United States Patent Application Publication US 2026/0191916 A1 - sequence listing, part 89

SEQ ID NO: 596 - DNA, 4685720 bp, Bacteroides finegoldii (residues 1,561,908-3,123,814 of 4,685,720)
  source 1..4685720: mol_type = genomic DNA
ttttagttcaaatgaactgaaaggcgggatgttttttactgacatttgtttgtctgaaattaaaattggctatatttgtccggctttcattataaaaagcagaatagatgagtgaaaaagtagaagacttggatgttcgttttgaacggttttacgcggctaactaccctcgtgtcaagaactttgcgaagttgttgaccaaatcggaggaagatgcggaagacatcgctcagaatatatttcttaagttatggacacgtcctgaactttggcaggagcaagaaaccatgacgagctatctttataccgttacccgaaatgaaatcttcaaccttttcaaacatcagaaggtggaacaggaatacgaagataagataatgaaagcgcagttgataggtgatttgtgtgatgaagatacttcattgctcgaaaatctctattataaagaagtgctcctcctcgtcaagatgacactcgaccaattgcctcccaaacgcaggcaaatatttgagatgagccggtttgaaggtttgtctcacaaagaaatagcggagaaactgcaaatccctctgcgcacagtggaagaccacatctacaaaacattgaccgaacttcgtaaagtgttaatgtttgttattctcttccggttctttccgtagtttctctttctgaatggtggtaattatgtaaacgtttcttagaaacaataaatatcaccttatgaagaattatattcgtgacgttatagaccgttatatcaagcatgactatccggcggaagtcgaccgggattttcgtgtatggcttatagatgacgaacgtgccgatgaaaaggattccgaattgagtcagctttggaaagctaccgaatccgcaactactcccaattatcaacattcgttggagaggatgagagaactcaccggaataaagacgagacaaaaagtacataccttacatacgcggctggttatctggaagattgcagcggctttgctgattgccgtatccgctggctctatttatctggctttacagaacagacaggcaccggacttgttgcaggcttatatacctaccaccgagatgcagaatattactttaccggacggcacgcaagtgatgatcaattcagaaagtaccttgctatatcctcaacagtttacgggagacagtcgttgtgtctatctggtgggagaagccaacttcaaggtgagacgtgacgaagcacatccgtttatcgtaaagtcggcagatttccaagtcacggcattgggaacggaatttaatgtgtcggcttatcccgaagaggaagaggtaacggcaacgttgatttcgggaaaagttctggtagagtacaacgggttgaaagagcaagagatactgaaacccaacgaacagttggcttataataaacacacccgcttgggtagtgtgacttatccggatatgcaggatgtcacagcctggcaacgcggtgagattgtttttcgcagtatgacgatggaagagatcttcacccgtctcgaacgcaaatatccttatacattcgtgtatagctttcacagcctgaaaagtgaccgttttaacctgactttcgggcagaacgcttccatagaagaagtgatggatattattgcccgtgtgacgggtaatctggattataagatagtgggcgacaaatgttatctgacggtgcgtcataaataacgttcccgctaccggactatttgaataacaccgattattaaccttaaaatatacaagaagcctatgcggaaaaaatatccgggagaagctgcaaccttcccccggatgtgaaatcgaaattcttactattagcgttacacaaacgctactaaattcgagaatctaactttatctgtataaactaatactaagaagatgcagcaaatttatgaatttatagccaataagcagacaatcagccgagtatttatgctttttttgtgctgtctgctcctttctatccccacttttgctcaaaatagcagtgcccggattacgatccataagaaaaacatatcggtcattgaggcgctgaaagaagtggaaaagcagacgaaactttctgtcggctacaacgaatcgcagttgaaaaataaaccttccatcagtttggctttggaaaaagcgacattggagaactctctcaccgaaatcctgaaaggaacaggatatacttatcagttgaaaggcaaatatgtcatcattgttccgcaagaaaagaaagaagcggagcaagcgtctgtcaaacgtatcgcagggcaagtgctggatgaacagggagaaccgctcatcggtgtgaatgtgctggtggaaggaacgagcataggagctatcaccgatatggacggaaacttctcgctggaagctccggtaggcagtacgttgagtatttcttacgtgggctatactccgaagacattgaaagtgggtggagcgaacaagtacagcgtgcaactcgcttcggatacgaaactattgaatgaagtcgtagtgacagcattgggtatcaagcgtgagcaaaaggcattgagttacaatgtgcagcaggtgaaatccgatgaactgactcaaattaaagacgccaactttgtaaacagcctgaatggtaaagtagcgggtgttactatcaatactagttcttccggtgtgggaggagcaagcagggtagtgatgcgtggtacgaagtccatcgagcagagcagcaatgctttgtatgtcatcgacggtattccgatgtacaatttcggaggcggaggcgatacggaatttggttcaaaaggagctaccgaagccattgccgacatcaaccccgaagacatcgaaagtatctccgtactgacgggagctgccgcagctgccatgtatggtagtaatgccgccaatggagcgattgtgattaccactaaaaagggacacgtagggaaattgcaggtcggtgtctccagtggcattgaatggttgaagcctttcaaaatgccggattttcaaggacgctacggaaccgggagcaacggcaaagccggtaattcaagtatttatagctggggaccgaagttgaatgcggccgcacagaccggatatgaaccgagtgatttcttcgataccggtgcggtgtattccaattctgtgactttatctacgggaacggacaagaatcagactttcttttcggtagctactgtcaattcagcaggtatggtacccaacaataggtataatcggtataacttcactttccgcaatacgacaagtttcctgaatgataaaatgaaactggatgtcagtgccagctacatccttcagaacgaccggaatatgaccaatcagggacagtattccaatccgttggtttctgcttatctttttcctcgtggagatgatttctctgtaatcaagaacttcgagcgttgggatgaggcgcgcaagatcagtgtgcagttttggccgcagggtgagggggatttacgtatgcagaacccttattggatagcttaccgcaatcttcgtctcaataataagaagcgttatatggcttcggcaggtttgagttatcagattctggactggttgaatgtggcaggccgtgtccgcatcgacaatacccacagcgagtatgaaggcaagctgtatgcaagcactagtacgacactgaccgatggtagcacgcaagggcattatacggtgaacaacggacagaattcgcagacatacgccgatgtgttgataaatatcaacaaacgtattcaggattttacgattgttgccaatatcggagccagttatagtggtatcaccagcaaagagctgggatatgcggggccgatacgtgaaacgggaattcccaatcttttcaatgtatacgatttggataatgccaagaagcgtgccacacagaccggttggcgtgaagcgacggaatctatctttgccagtgcggagattggttggaagagtatgctttacctcactttgacgggacgtaacgactgggcttcgcagttgacacattctccgcaggcttccttcttctatccgtcagtcggcttgtcggccgtcatttcggagatggtaaaaatgccggaatgggtggattatctgaaagtgcgcggttcgttcagttccgtaggtaatccctatccccgtttccttacttatcctacctactcgtatgatgcgactaacatggactggaaatctcaaaagaacttccctatcggcaaactgtaccccgaacgtaccgattcttgggaaatcggtctggacgctgcgcttttcaaagatttcaagttgagcggttcgttctattatgccaatacgtacaaccagacgttcgatcccgaacttcccgtatccgcgcgttacgacaaactctatgtgcagaccggatatgtacgtaactacggttttgaagccatgttggcttataatcatcgctggggagattttggttgggataccagctttacttattctaccaataagaatgagattgtagagttggtgcgcaattatgtgcatccggaaacaggagtcatctacaacgtcgacaagctggaactgaaaaccaatgaaggacgtggtttcggtaaagcgaagtttattctgaaagaaggtggcacattgggtgatctttatacacatgccgacttaaaacgtgacattaacggcaatgtgctgattgatgatgacggcaatgtgacggctgttgataacgcaggtgacataaagttgggaagtgtgcttccgaaggccaatcttgcctggaacaatagcttcacttataagggaatcaatgccggattcttggttactgcccgtttgggaggtatcgtttactccgctacccaagcttatctcgatctgtacggagtgtccgagacatcggctgccgcacgtgatgcgggcggcgtatgggtaaatgaccgtagtcaggtgaacccgcagagtttctattccgtagtggcttcgcagagcggacttcctacctattatacatacagcgcgacgaatgtacgcctgcaggaagcgcatatcggttataccattccccgtcgctggctgggcaatgtgtgcgacattaacgtttcacttgtgggacgcaacctgtggatgatctattgcaaggctcctttcgacccggaagcggtggctactaccaacaactattatcagggaatcgactacttcatgatgccgagtacccggaacataggattcaacgttaagattaacttctaaatatatatgatgaacatgaaacgaatatattaccttcagagaatcattctttcggtgctcttgctgttacccttgtccggttgtttcgacagtgacatcaaccgcaagatgtacgaagcggatgatgacgaaatgcaacgcgaaaatcatattgtcggtgcgacgttgagagtgatgcaagggcttgtcagcccgacgcgcgagcatttgtaccagtttatggatgccatggcgggcggtgcctacggaggctatatggaaggtatcgtagatacatgggtaatgaagttctctacattcaaccccgaacagggatggctgaaatccccgtttgccgaccctatcaccgacctttatccccaatacctcaagatgttgagcgtgacggatgatccggtagctttggctttggggaaaatcctgcgtgtctgcgtcatgcaccgtgtgacggatatttacgggcctatcccttactcgcagatgttgagtaatgacaatctgggagagaacctgtccgttccgtacgattcgcaggaacaggtctatacacagatgctgaaagagctggaagaggccgacaaggtgttggaagagaataaagacctttcttccgaagcgttccgcaagttggaggacttgtattacggcaacatctccaaatggcgcaaattcctccattccatgcagcttcgcatagccatgcgcatgagttatgtgaatccgacggaagcgcagcgtatcgcccagaatgccgtagcggcaggagtgatcgaggcgaatgaagataatgctatgctccatgtagccgagaaccgttccgaactgttgttcaacaactggaacgattaccgcatcagtgccgatttggtttccgttatgaaaggatacgaagacccccgtctggacgcaatgttcgtgaaagggaccaatgtagtggaagtggatggcgaaccaaaggaagtgaatgatttttatggggtgcgtatcggtatcttcaccgagaagaaggacgacatgattaatttgtattccaaacaaatcatcagcagcaccgatccttacctttggatgaatgctgcagaagtgaccttcctccgtgccgaaggcgcgttgcgtggctgggacatgggcggcgagccgcaggcgttgtatgagaaagccatcgctctctcgttcgaggagcgcggggctacgggagccgataaatatgtgaaggatgcagaaaagaagccggtgaagtacgtagacccgatgggcgcttatagtgcggatgcagtgagcgagattacgattgcttgggaacaggggtctggaaaggaaatcttcgagaggaatctggaacgcatcatcacgcagaaatggattgccatcttcccgttaggtctggaagcatgggcggaacatcgtcgtaccggttatccgagattgcttcctgccgtagagaacaaagatcctaataacagtgtggatatcgctatcggtccccgccgcctgccttatccggcagacgaatacaactccaacgctgccaatatagccaaagccgtacagatgttgggtggtgccgacgctgcgggcactcctctttggtgggacgcgaaagaccattcggttgagaataactaatagctctttacaagaaccttttttaatccataagattatgaaatataaatcaatattcaatgtatgtctgctgaccgctttcctgttgactgcgaccacttcctgtgacgattggacggaaatggagattcatgagacggatgtcaacggagcaaaggagcagaacccggaacaatattctgtttatacgcagaacattcgggcttataaagcaacgaagcatgctgtggtttatgcccggcttgacaatgctccggacaaggctaccagtgaaaagttttttctccgttccttgccggacagtattgatatcgtatccatgcgcaatgccgaccgcctgactgattttgaccgggaagacatggcgatggtacgtgccgattacggaacgagagtgctttattatgtggattgtacgccgggagacaaacagaatgccgctatcgcctctgctgccgaagccgtacgggcgggaacgtttgacggcattacgcttgcctcttccgttccggtagatgcggcaacgttgcaatcgctggctgatgcattgggacagacaccgtgcttacttatttttgagggaactccttccctgttgccggaagcgcaacgcggtcttttcagttatttcgtactggatatttcggctgcttccgacgaatatgacatagagacggaagtccgtctggctaccggttacggtaatactgccgccggacatctgttgctggctgtaacttccgaaggtacattgaccgattataacggagtgacacgttctgccattgccggagccgcttacagtgctctcaacatggagacaccgttgggaggcattgccatttacaatatctcggacgattattacgatgctgatattatttataaacagactcgcggaggcattcaatttttgaatcccgcttcggttcattaaactaagtaagctatgagaatacataaactttatcagtgcctcgcagccgcaaccctcttgtttttgccggttgcctgcgacaatacggattacagcgaaaaatcaccgtttgacaattcggcatacctgaatgtggctgctactaaaaatgcggaaactttcacgtttaaccggaaagtgacaagccagacgaaaacgtttacagtgaaattgtcttatccttcaggggatgatgtgaaggtgaacttaaaggtagacccttcattggtcggtgcatataacgcaaagaacgacacgcattatgaaatgctgcctgccgaacattatcagttgtcacaggagtccgtaacaattcctgccggaaagataacatccgacgaagtcggtatcaaattcttgaaactcgacgagctggagattgacgctacttacctctgtccgctttccattagtggggccgaaggagtgggaataatggacggctcacgtaccatgtattatctggtgcgtcgctccagtgccataaccacggcaataaacttgaagaatgtctacgtcaccgttccgggatttgataagggcagtccgacagctgatgttgtgaataacttgagtgccgtgacgatggaagcgattatacgggtgaatagcttccaaccggaaatatcctctattatggggattgaaatgtatctccagatgcgtatcggtgatgctaactttccgaaccagcagttgcaggtgcagaccacgtacgggaaatttcccgatgccagtaaacaaaagctgttgttggcgggtgagtggtatcacgttgcgttgacatgggatttggctactgctactatcgcttattatgtgaacgggcagttgcagagtatcagtaccagtcatggtaaaagtgatctgaccagcatcagtttgggcgacaaagaacctgatgatgaatttggcaatggtggtgaccataatttctatttcggacgatcttataccttgtctcatgatttgagccgccaatttgacggtgaaatctgtgaagcccgtatttggagtgtagcccgtacgcaagaacagatttatcagaatatgtatgatattcttaatccggctgacgagcctgctttgtgtgcttattggaagtttaatgaaggaaccggcttggaagtagtagaccgtacagggcatgggaacaatgcgaaagtagttccttattggaaaacggtcgatcatgtggaagcttatagtaagacggatgcggaactttggccgagtggcattgaggtgccgaaggtgaatcaggaataagggattacagataactattaaaaatgtatatgattatgaaacgaataatacgaaatatctcttcgtgcgtgttattggcactggtgatgggagcttgcgaagaagatgcggcgttggtgtctccgaacgtagcacatgacaagtctacagtatcaccggaggaagttggagaaactgctttcctgcaaagtgcttcagaatcgggaaataaatttatttttcttgattttgtagaacagggaagtgatgaactatatgtagaattggtggagccggccgagcgggatatgacattcacaattggtataaatactttgttaacttatcaggatatgccatcgattgcagagcaattttacaaagtggaagcaggttttgtggaagattgggagaataaatttacgataactaatggaggaaaggtgacagtagcggcaggtgaacgaaaatctacacggataagttttactgtgtcaagcgtgggacttatcggttcttattatctattgccattgttagcgacggatgaggatggtaatcagtacaagcttttctattatatctgccaagtagaaatggaacgtcaggacaggtcgaataagccttatacagtagtggcgtatattgatactgaaatgatgaatcctttgattgctgaccaatatacttctaaattgcagtatatgaaatcccgtcgggatagaaaaactatttacgaaaacgtcccggtatttgatatagtgaatttacgaaaagctttgttgaaatacgatgagtcttcccgtagagcggttttgaagtttacgcctgatatagaacatgtgttgaaaaactacgctcaatatattcaaccattgaagcggagtggtataaaagtctgtctttccatcgaaggtggaggaacaggcataggttttgccaatttaacagatgtgcaaattgctgattttgtagcacaagtccaagtggctgtgaagatgtatcaactggatggcatccatttgcgtgatgaaggtgccggatatgacaagactggagcaccggagttagatgaaacttcttatccaaaattagtcaaggcactgcgtgaagcgatgccggacatcatgttgactcttgcagatgatggaggaactacggcaatgatggacaaagaacagggtggcattgtagtaggcgattacattgatttggcgtggaatgttgtgtgggatactgcggttaatccttgggcaagcgggtcggaacgcaaacctatagcgggagtaacgaaagaacgttatggtggcatttctttttatataaagccgataatgacaaatgaagaaggtttattctttgggaatctgcaggatgaatcccgtgcaatcgccctgaatgagggacttggaaaagtagctgttgtagaaaatattccttatagagactatatatccgaaattgcgaatgtccagagaattatgggccttttaagctgttttcatgatactaacaatggagaatatcctcgatataatgtgaatgtaacggagacgttggctgcgtcatattattttgctttccgaaaagattggtaaattgaaaagtgctctctattgatgtaatagctgtttgtaagaatccgggattgtgggagatagttcgtatagttggtttactgatttacatatatcacacaaagcgaatgggtattatcagtatcgtaaaaactgctcatagaagtaattgtatttatttgaatgataactaattaataagaaaaataatgaagaatgtattgaaaatctggttagtcgacaacactgtaaccgtcgacaacaaagacgataagatcggtcagctcgaatcgtccggtaatctctcgttgcaggacatcctcgatgagatgcacaaggaagacaccgggctccgtcccgaaaccatcgagcacgtcgtgaagctctacaaccgtgtggtaggcgatcttatccttagcggatatagtgtcaacaccggtctttaccacgccgtagcgcaactccgcggtgttatcgatggcggaaaatggaatcccgaaaagaactccgtctacgtctctttcacccaagataaagagctgcgtgaagctatcgcccaaacctctgtcagcattctgggcgaacgtcaaagcgtgatgtacgttgccggattctcgcctgccaccgccatcgccggtcgtccgttcacggtcaacggccgtatgctgaaaatcgcaggtacggattcttctgtcggcatcaccatcaccgacagcaaagaacaaaccacgcctgtcgatctcaatatgctggctgtcaacaatccgtcacaactcacattcatcgttcctgccgggctggcggatggcgaatacactctcaccatcacgacgcaatatgcaggcagcacgctcctgaaaacgccacgcactgctatcgctactttctacgtcggtacgaaacccgaaacaggaggcggctccggtggtgaaggcggtggaggaggagaggctcccgatccttcggaataaaatgttcttagccgggggtgaaactttgccccggcttatgcagagaggctgcacagctctacgcacgcatcatgtatagagttgtgcagccttcgtgtatagggctatacatgataagtgcataactttgatctttttcgcataatcttttttatagtactaatttattagtacttttgtctctaccgaaagaaaagatcaacgattatggcaagaataacgattccatacgcagtggccgacttcgcagaaatgcgtgaacgtggcttttattatgtcgataagacaaattacattccggggcttgaagactataaagctcctgtttttctccgtccccgccgtttcgggaaaagtctgcttatctccatgctggctcactactacgaccgtacaaaggcgaatcgttttgaagaactcttcggtggcacctggattggcgaacatcctacgaaagagcataatcaatatatggtgattcgttatgacttctcggctatggtgatggcgaatgatatggaaggactggcacagaactttaataaactcaactgtataccagtagaggtaacgttagaacacaaccgtgacctgtttggggattttcagtttacaactaggggaaatgctgcgcagatgttggaggaacttttgggttatgccagttcacgtggattgcctaaagtatatatattgattgacgaatacgataacttcaccaaccaactgcttacttcctataacgatccgctttatgaaaaggtaaccaccagcgacagtttccttcgtaccttttttaaagtgattaaaaaaggcataggcgaaggtactatccgtacctgtttctgcacaggtgtattgcctgtcaccatggacgatttgactagcggctacaacattgcggaaattcttaccttggaaccgtctttcctcaatatgctcggtttcacctatgaagaaacgaagacatacctgcgttatgtacttgataaatatactcccggtgcaagcgaagaacgtttcgaggaaatctggcagctgattgtgaacaactatgacggttatcgtttcagccccgtcggcgaacgtctttttaactccactatcctaacttatttccttaagaaatttgccgctaatgccggaagcattccgcccgaactgatcgatgagaacctgcgtacggacatcaactggattcgccgcttaactctttcgcttactaatgccaaagagatgctcgatgccctggtgatagacgacgaactgtcctacaacgtcagcgatttatccagtaagttcaacaagaagaagttcttcgagaaagaattctatcccgtcagcctgttctacttaggtatgactaccctgaagagtgcataccgcatggtgctccccaacatgaccatgcgcagcatctacatggattattacaaccaactgaacaagatcgaaggtaacgccagtcgctacgtcccggtttatgaactttatgattccaaccgtagttttgaaccccttgtgcagaactattgcgagcaatatctgggacaattccccgcacaggttttcgataagatcaacgagaactttatccgttgttctttctacgagcttgtctcccgctatttgagccattgttacacttttgccatcgaacagaataactccgtcggtcgttcggattttgaaatgaccggcatccccggcacggattattacacggacgaccgcgtggtggaattcaaatactatcgttccaaagatgccgaccgtatgcttgcgctcaccgaaccgctggcagaacacgtagaacaagtgaagggctatgccgaagatacgaaaaagaagtttcccaattacaatgtccgttcgtacgtggtatatatctgtgccaataaaggatggaagtgttgggaagtataatcactttttcccggcttcatgccgtctgtgagaaatattcgtgtaactttgtaggctgatagtataaaaacaagaaggaaaagaatgatagtttgcatagctgaaaagccgtctgttgcacgtgatatagccgaagtactcggcgctcataccagaaaagaaggatatatagaaggaaacggataccaggtgacctggacgttcggacatctttgcaccctgaaggagccgcatgaatatactcctaattggaagtcgtggagcttaggtagcttaccgatgatccctccgcgtttcggtatcaaactgattgggcatgatccgggcattgagaaacaatttcatatcatagagcaattgatgcaaaatgcagatgagattatcaactgcggtgatgccggacaggaaggagaattgattcagcgttgggtgatgcagaaagcaggcgcccgttgtccggtgaagcgtttgtggatttcgtctttgacggaagaagctattcgtgacggatttgcaaagctaaaggatcaggcagattttcagtcactgtatgaagcgggactttcgcgggctatcggagactggttgcttggtatgaatgccactcgtctttatacaataaaatacggtcagaataaacaggtactttctatcggtcgggtgcaaacacctaccttagcgttgattgttaaccgacagttggagatagccaacttccagcctaagcaatattgggaattgaaaacgaactaccgggatacaaccttttcggctttaatccgcaaaagtgatgaagaaatcgctgcggaagaagagaaaaacggtgggaaaaagaaaataatagagaatcccggtattgatcctatcgctaacagggaagagggcgaggcgttggtagaacgtatcaaagaccttccgttcgtagtcaccagtgttagtaagaaagacggacgggagtttgctccgcgtctgttcgacctgacttcgcttcaggtggaatgtaacaagaaattcgcttattctgctgatgagacattaaaacttatccagtccctttacgaaaagaaagtagccacctatccgcgtgtcgatacaactttcctgagtgacgatatttatccgaagtgccctggtattctgaaaggactccgtgattatgaagtactgacagctccgttgaacggttccacattgccgaaatcgaagaaagtatttgataattcaaaggtaacagatcaccatgccattatccctaccggagtgtacgctcaaaacctgacggatatggagcgtcgtgtctacgatctgattgcccgtcgttttattgccgtgttctatccggattgtaagatttctactactactgtgatgggagaggtggataaaatagaattcaaagtaagtgggaaacagattctcgaacccggatggcgtgttgtctttgcaaaagatgtaaaagatacgactgaagaaaaagaggaagaagacgaaaatgtacttcctgcttttgtgaaaggggaaagtggtcctcatgttcccgatttgaatgagaagtggacgcagccgcccaggccttacacggaggcaactctgcttcgtgcaatggagactgccggaaagttggttgataacgacgaactccgcgacgcattaaaagaaaacggtatcggccgcccgtctacccgtgccgctatcatcgaaacgttgttcaaacggaattatatccgtaaggaaaggaagaacctgattgctaccccgacaggagtggaactggtgcagcttattcatgaagagcttttaaaatctgccgaactgacgggtatctgggaaaagaaactccgcgaaatagagaagaaaacgtatgatgcacgccagtttcttgaagaactgaagcagatggtttcggaaatcgtaatgagtgtgttgtcggataatactaaccgccgtattaccattcaggatgcggcagccgcccaagccggagaaaaagtgaagaaagaaccgaagaagcgtgaacggaaaccgggtgctccgaaagaaaagaagccgaaggctacgcctgcggctactgttaatgctgattctcttgtcggacaaccttgtccgctttgcggcaaaggaacaatcataaaaggcaagacagcctacggatgttcggagtggaaaaacggatgtacttaccggaaggcattatgaaactcaatcaccgcttctattcccttacggaaaatatccagtgagaaattttcattcggcgaatggatggcgtccgattcgagtccgaatcccattaatacggtcttgactcctaatacttgttcgaaagtggatatgataggaatactgccgccgcggcgtacagccaacggctttttcccgaaagcaatctcaaaacctttctccgccgcttgataggcgggaagggagatggggcagacataaccctgtcctccatgcatcggagtgactttcacctgtaccgtgtcaggagcaatactaagaatataatccgcaaacatttgagaaatcttatggtggtcctgatgtggaaccaaccggcaggagactttggcgtaagcttttgagggaagcacggttttggaaccttctcctgtatacccgccccatataccgcatacgtcaaaagacggccggcaactgttacgttccaatgtactgtatcctttttctccgaatacttccttcacaccgatcgcttctttgtatttcttttcatcaaaaggaatacgggcaatcatctcccgttcggcttgtggaacttcttctacatcgtcatagaatccgggaatggtgattcttccatccgcatcggttattttactgataatcttgcataacacattaatcggattggctaccgcacctccgaaatgtccggaatgtaaatcacggtttggtcccgtaacttctatttcccaataagccaggccacgcagacctgtggttaacgaagggagttccgctcctagcatgctagtgtccgaaacaagaatcacatcggatttcaacaactctttgtgctcttcgcaaaaagcctccaaactgggagaaccgatttcctcttctccttcaaagataaacttcacgttatttttcagcagtccgttcttgaggagatattggagggctttcacctgaataaatgattgtcctttgtcatcatccgcaccacgtgcccaaatgtgaccgtcacgtatttccggctcgaacggttggcttttccaaagctccaacggctcggcaggcatcacgtcataatgggcgtagactaaaatagtttttgcgctcgggtctactatcttttgggcaaagacaatcggattgcctttggagggcattaccaatgcttcgtccgctccggcttccaataatagctgtgcccagcgttcggcgcacgccagcatatcatcatggtgttcgggcagtgcactgatacttggaatgcggatgagactgaacaaatcctccatcattcgggactcgttctctgctatatatttctgaatttcgttcataaattgaattaaacattaaagctgcgtggttttatccagcaggtaatagtcaagtatagtcatcgcagccattgcctctacaatgggaacggcgcgtggcagtacacaggcgtcatgacggccgcgagctttcagcgtggtgtccactccgtcgatattaacagtctcctgctccatcaacagcgtagcgatcggtttgaataccacacggaaataaatgtcctgtccgttactcaatcctccctgaatacctcctgaatggttggtatgcgtttcaatccgtccgttgttgttatagaaaacgtcattctgttccgaccccttcatcttcagtcccttgaatccttcaccgtactcaaatgctttggcagcgttgatacttaacatcgcatttcccaaagccgcatggagcttaccgaaaacgggttgtcccaaaccgatggggcagcctttgatgacacaagtcagcgtaccgccgatagtatcgccttctccttttaccttatatataaggtctgccatttcttttgccttttccgggtccgggcagcgtacatcatttgtctcgatcaagtcgagatcgtagtccgagtaagtgccttccagtttaatagctcctacctgtgaggtgtaagcagtgatactgatacctaactggcggagtgccagcttggccaaagcaccggctacgacgcgtgataccgtttcgcgtgcagacgaacgtccgccgccacgatgatcgcggataccatacttcactgtgtaagtatagtcggcgtgtgaagggcgatatacatttttcagattgttgtagtcattagaatgttggttttcgttccaaacgataaaaccgatggggcaaccggttgacttaccttcaaaaataccggaaagaaactctactttatcagcttctttgcgtgcggtggtaaggatggattgtcccggacggcgccggttcagttcctgttgtacgaattcttcgtcgatagtgattccggcgggaaatccgtcaattactcctccaattccttttccatgagactcaccaaaacttgtgagccgaaagatgttgccaaatgaattaaacatagtcgtggctttttaaaattactgtatgcaaatataacaaagttttcgataagattgttgtgaactcaaaatatcttcaaaaaaggtggcatattgaaccttttttcttcttttcagttgataaatgatgattaataataactaaaccaatgactgtatgaaaaagaatccatgaacgggaagataatgacgttcggggatattgtaatagacaagtgcgccgtaaagaagggagaggggatttcaacctttacaggacaacagcaacttacatttgctggagaggcggctgccttgggagcttgcgatgtaactgtggtgagttatattttaaattttcaacggtttgatataaccgtttgaggaataaatttttagctagatatttgagaagtggcggtaacgattaagaaaccgtgcaattttcagcgttttgctgtatctttactgtcaaataactctttatgcaaaagtagtcaaaatccacagtcaagcaaaataattggctatttttagtcgtaataggttctatttagtcgtaaatagtcgtaattcggcatatttagtcgaaagtaccgattatgacttaacataccacatcctgcctttaagaatgattgcccctgcttctttcatttccacaagaatgttcccaaccattcgttcctgctgttccggagtcttggtcttaggaagtacatctttgagataatcaaatatcgcatcacgcttagttcctgccgaaccagcattttgaagatactgcaaaatcatttgttggagttttgctttatctagtcctctggtgcgagtataatgtggtaactgttttgtccttttagcaatatcaagggatatgctatattcagaaacagtcccctctaaaagacctctattcaataagtctatcacattctcatcagaaattcgacgtcctttttgtactgagtccaaaagaatacaatcctccaatgtcaatgttttgttttctttgagtagctgtgtgtatttttcattgattgtattcccatatattgtcacaccaacctctttatttaatacatctatttcataatccggcatcgggaaatgacgacgcctttgttcattgaacatctttttaatgccacgacttacggtgtctatcatgttgaaattcaccattgcacgacaaagacactcatttcggaaatgacgttgaggtcctctggtttccaaagccttttgcagagtaccaggaataaaactacctccatttgcatagtaaatccatccgggattttctacaaaattgatgcgctgctgtaaagtataatcctgatgtgcaatggcattatgcagtgcctcacgaatagtgtagtcgtcatattgcttcattgtttctgggaatagtgtccctcctggcaattccctcattgtcagattgtgtatcttgctcaagattttgtcaacggtaagaataaatggagcagtgaaatgttcataatctacgacatttttgaattcgtcccgtaaagtccatgtaacttcaactacagcaggacgaagtttaaatacagaaacaggttttcccaacagaataatagctgcacgagtcagtttcccaccgatcattattccactattggaaagaaaatcttccaacgtccatgcatcaatttcctcagaaggaatattggaagaatgtacctttttaaacataatacgagctttcgctacagccaattcatccaaatccgctattgtcgcattaggaacaatttcagcagaccaatccttggtttcaaagacaggttcttctagaataacggcaagccgttcttgtgtcatctccaccaatgaatcttcgacacgctgccatgcttttttatgagcataaaccggacgtcgaggtaaatgttttggaatatggattatccaaaccgttttatgtgtatcctctgtagtatattcgtcaatacttaatccttcggaagaaagattggtacaatgctctatcagtttccatacagcagattgggcattcaaattaaacttggataaatctgtcccaacaattgccaatgttttatcctgcacaccgataacaagatgtcctccctccatattcgccatggctgatacatatgaaataacatcattcttttcatctccggcaaaggtattcttgagatttttcatctctttccactcacagcgtgcattctcttgcggaaattcacggagtaaatattgttgaagttcttttgaggtcataatagaatttttctacaatttagtaactgaatttgccaatcttttctcaccatcaatttcagttgtataataacgctgatttagagtatttaataattcagttagttctttttcattggatatacgaaatctatttgtcgtagcatcatatagattaggacaatattggctaatataattaggtattctatttttttgttcggttgagaaattattgtatctttctgttgcttccttaatccgtctgcgattagccgtttttacttgatctttgctaaaatctgattctaaattaataatatccatagatagaaaagtttctacctcatcatctgttgcttccctgtacaattcattgataccattgaaaatagatgttatagtatttaggtttttgaagtacaatcggtccgtatcttttacaaagatacagtctggagtatcttttattactaatatattatcttcttttaggagccttgcttgatctgagggattctgtaaattaccccaagaaatcatactcctttttgaatacaaataactcggggtgattttttgcaacaaaaaatatttatcattttgtatggaaactacgaaatctatttttttataatcctctctcctcatatatgagtatgaagttggaacaaaattttctcgtaataatgatatacaatattcttttgttgaaaaattttcaacgacaaaccattcaccttcttgaagtttatactcatcatcataacttctagcattatcaaactcttcaatgttatcaaatactgttacgtcagataaaactctataataagagccgtttactcctttagtttttgaaattaaatagtccataatttatttctcaatatcaatataggtaaagtcgttaatttgtcctatacgtttaaattcgcatatttctcttaatttaatctctttcttagtcataattagtattctatgatttcctgtagtcacaaaatagtatcgatatcctaaaatatggaaaattggattatacaaatatatttctgcacaaaaacatagaattgtaacagctccataaatgaaaattaaagatactacagtatttatacttaaaccaacaaatacataggcaaaaaatgtaggcaggaaagtagaacttgcagattctatttttgtgatactttccccctttatttctgtaggatctaatttataaaaccttgtagttccataccaagtagtcagtattggaacaataaagtataaacaataagaaatccaattaggaaaatctatcggaatacttttgtctgtaagatacatccagattttcccaagtgttatctctttattggtgaaacatatgctaatcagcaatagaaatgcattagcaacgaatattaatttgtatagcttcatatatttatctcaaaattattctgtacaatatcatagatgtccaccaacacctttaaacttttcgacaaaagcggcaattttttcaaataccttatgttttttagtcagatataaaggattcaacgggctcattttgggcaggatgttattaaagtcagtcccattctcacttgcgtattcacgtcttaaagacacttcaatataatgcttggcttctctttcattcagattttcgctttctatcaaatccgaggcttccttcttttgcttagtttgcgcatattcaaagaatgcttttataatttcagttctatcagaaatgacatcgagattagcatcattgataaaatcaactatcaggctttctttggctctgttgccgacacttgaccggataaccctgcggatttcttctatcaatgaagatttgtccatcttctttttgttattttcaaaaatcagctcaagaatataatctaggtttatctcctgtgatttaagcaaatctatctcgaaaatgacatcatcccagtctattcttgatttttccgacttctttccttctttttctcgtcttaaccaatcccgtatatcgttataagtcgatttgtaatcctgaatgactctatcagacagcatttgtagtttctgcatttttgcaatatcgtcgtcagtgacaaaataatcgttcttaaacgcttcaattgcttctggattaccgctatctattgtttgaaaagctttgagcatagtgaactcatcaaaattctgcaatatgttttctacccgtagatattcgccaaacagcttgacaaaatctttcttatcttgttctgtaacgatattgtctgtatctgggaatttatcattcagttcttttacaatttcgatatatcctctccgtgcttcgcccgaagcaatgtctttgaagccttccaaatattccctgtagcttttttccagcactacatttgcggtattttcatcaccgaataattttatggcatcaatcgtatgtttttcgagatctctgaacgtaacgatattgccaaacgtcttggtggcatcataaattctgttggtgcgggaaaatgcctgtatcaatccgtgataccgcaagttcttgtcgacaaacagcgtgttcaaagtaggagcgtcgaagccggtaaggaacatgcctactactatcacaagatctacatccttgtttttcactcttttagcgagatctctgtaatagttctggaactctttaccgtcaatgccaaaacttgttccaaatagggtgttataattgtcaatggcttttgtcaaaaactcttttgcgctaaggtccattgccgacggttcaaagttttcatcaggtatctcacctattgcgctctgctcttcgttggctgcaaaagaaaatatggtagctattttcaatggtttctccgagtttctctgcaataggttcaattcctcatagtagcatttggctgcatccacactactgacagcaaacatggcattgaagcctttgctgtcactttggtttcgatgggtcttgattctgaagttgtgcaaaatatattgtgaaatctcatttatacgggcaggatgaagcaaagcctgtttgttttctgcggcacttagcttctgctcgtcaagttctgtttctatattcctgaaacagggttttacattgttgtagtcaaccttgaatttcagcactttttcgtcgcggatggcatccgttattacatatgaatgcaattctctgccgaacacactcgccgttgtttccgaaccataagcattctccgggaatatgggggttcccgtaaaaccgaactgataatacttcttgaacttttttcttaattgtttttgcgcttcaccgaattgggagcgatggcattcgtcgaaaatgaaaacaacttgcttttgataaacgggcaaattgtcttcacttttcatcagattattcagtttctggattgtagtgacgatgattctgttgtcatccttctctatattccgtttcaatcctgctgtgctttcagacccgttgacactatctggagagaaccgctgatattctttcatcgtctgatagtcaagatccttgcggtcaacgacaaagaatactttgtcgataaagtccagttgggttgccaaccgtgctgccttgaaactggtaagcgtttttcccgagcctgtggtatgccatacatatccgccaccttcggttgttgaccatttttttgcttggtatgcgcttctgattttccataacatacgttctgtcgcagcaatctgatacgggcgcattataagcaaggtattgttggtgtcaaagacagaataggtaaaaatgacattgagcaaagtgctcttttgaaaaaaagtttctgtaaagtctttgatgtcctttatcgcggtattttttgcatttgcccagttcatggtaaagtcaaagctgtttttgttgcgctcaaccgtattggcaaaataacggctgtccgtgccatttgaaatgacaaacacctgaatatacttgaaaagtgaattgtcactgttgaaactttctttggaatatcggtgtacttgattgaatgcttctcggatagccacaccacgtttttttagttcaacatgcaccaacggcaaaccattgaccaatatcgtcacatcatagcgattagcctgtgttccaacttgctcaaactgattaattacctgcaccttatttcgggcaatattttgtttgtcggcaagatagatatttttgatatgtccgtcatcaaaaacaaaatcatatatgtagttatcgtgaatcttacgagttttatcaaccaaagtatcacctggcttatccaaatattcctccacaaagcgcagccactccttatcagaaaactccatctcattaagttcctgaatctttatacgggcattatccaacaatgctttaggtgttgaaatatccgagcgatattcataaccctgattcactaaatcctggacaaattcgcgttcaaggcttgcttccgactgataagtcaccgaaggctcatgaagttcattatacttggtatagtcgtcaagtactatgaagttatttgattctgctatgatgttatattgtgccattttattattctgtatagtagttattatcaataagatgcttgaataatagcttcaatgtctcttgctctggtctggtaggttcaggaattgtttcgtaagataatgttgaatgacttgtaaattgaatgattctgttatagtaagtcttcttatcatcaggcaacaaatcagaccattgcggatatcctaaaaagttagcagtcttttcataaagattccgaagaagcataaagtggtatttctgaatattgttgctgtcaattgcttcttggattatctgttttaaataatgatgatatgaaaaactcttgttggaatctcctttcttttctaacaagtcgtaagtaccatcctcgttgttctggagcaaatagcaagctttgttccctgtttcgttgaacagaacattgaaaaataagggattgtgagttgagacaataaaccgcaagccatttgcttcctttataagtccgcctaaattaaccgccaattcaatcaagtggttttcatccaatgaacttacagggtcatcaatgaagatatactgcaagtcattaaactgatcggtttctcgttcgtctggttctgctatatttagattcgcaacaatttggttaagcaggctgtaaaacacacaccaaataaggcaactctcttcgcctcttgaaatcttgatattgtctattgtttcttcatttcctccttcaatggaaaatgtaacctcattacattcttcattgaagcggggtgttaatttatcgctggtgtaacgctgaaaatgagttacaatatttctttcctgtccttgatttctgagcacccaatcggtaaagttgtttggttgtattttgagtttcctgtcagagtctgcatccaaatcattatcccaatagaacaaatcctccgtgaatgcgttataatacaaaacctttattttgtgttcctccgattcgtcattcgtgcttttgggagaaatcaactccttgaacgcacgagacaaacgtgtcttacccacaccgttaaaggcatagattagttgtacctttttattcgtgtcacgaagactttgtgctatttcagttaatgattgtcccatattatacgcttatttggattcttggaaatgacagtaatttatttctataatattcgtattgttcctgcactgcgaccatttctgccggaatacctttggtaagatcacccaccaatgcatcaaaattattaagtagtgtagctattcttacttgttcttcatgtgcaggaataggaataatagcattacctaagcccttggccgatatagaacatatttttccttcagatacatatttgacaatttgcttgtgataataatttgaccgcaaataatgggaaacatattgaggatacaagtcacttctaaatatgaaacaggcatcatgcactgcagctggttcgtctccgagccaagctaagccaactccaatgtcttctttattttcacctgcggcaacaattactacatcattcttttgagcatatctcatttttgaggcaagttcacttcgaagcctccctttgctttgagttgcatatagtccgtaatatgtgtacatatccccgtaatgaatgcaaggaacaccatcactaacaatgtctgtccttacaaatcgtttacctcttataaatgttcctatctcactcattttcatccaagttacgctttgcgtacccccccccctattttatcaaacattaacaatttattacgataatactcatattgttcctttctcgcttgcagctccgcttgcagctccgctgcaagatttgtaaagtgatcgagaatgcagacgatttcttcttggacttcaagaggaggaacgggaatctcaaattgagagtattttgatatccagtgacgagtatgatctacagcctcgtatttaatacatttcattgcataataaacatacttaaaagaaccatcaaaagtatcttttggtctcaacatcttcattgcagaacttttaattttaaactcaaaatctacccaatgaaatgatgttgtaaaatcatcaaatataatagtaggattttcttgactagctttatatactccaaacttttcatttgtatagcccaaaataaaagtttgtccagctgttagtactggtatatcataggaagtgtcatactcagtactttttacaatatattttgtcggttgctcatagtctaataattctcctaacttcttatagtccacaccctccgggcaaagttcctgtatcaattcttgcaacttactcatagttcatcctcctccaattctgctactattttgtctatttcagcacgcagttcgttttcccgtgccacaatccggcggattcgttcgttcaattccttaatgtctgtctttggacgggtgtcttccacctcaatataactgcttaccgacaaattataatcattttcagcaatgactttataatcaaccgatttggcaatatagtcaacatcttcctttttatcaaagatggctataatcctgtctatatgcctgtcttctagtatattgttgttggtctctttcgtaaagaaactttctccgcttgcatctatgaactggattttagtatcagacttgtgttttgatagcaccagaatattaaccgctatcgaagtgccatagaacaagttggaaggcaatgagataatggtttccacatagttcccgtccactaaatatttcctgattttctgctcagctccgcctctatagaaaataccggggaagcagacaatagctgcacgtcccttgcttgagagataatataacgcatgaagaacaaaagcaaaatcggcttttgatttcggtgcaagtactccagcaggagcaaagcggtcgtcattgataagagtcggatcatccgaaccaatccaatttactgaataaggtggattggaaacaatggcatcaaatggcttgtcatcaccgaattgaggatcaatcagtgtgttcccaagtgcaatgttaaacttatcgtaattgatgttatgcaggaacatattcatacgagccaagttgtaggttgtatgatttatctcttgtccgaagaatccatcttcaattatgcggtcttcaaactgccttttagcttgcaatagtaatgaacccgaacctgcggcagggtcgtatatcttattgacagtagcctgcttgtgcatggcaagtcgtgaaatgagttttgaaacattttgcggagtaaaaaattcgcctccagactttcctgcattggcggcgtaattgtttatgagaaattcgtaagcatcgccgaaaagatcaatctcgtgttcttcaaagctcccaaaattcaatccttccacacctttcagtacagctgccaaacgactgtttttgttttcaacggtattaccaagccttgtactagtagtatcgaaatcggcaaatagccctttaatattcttttcagaagcataaccattggcagaactttcaatagaatcaaagattgctttcaaatctgtgttaagattgggatttgtatgggcagtctttactacattgacaaaaagctgactcggatatataaagtacccttttgtttttactgcatcatctttaatttctggagtgataatgctatcaggcaaagaagcgtaattgatactatcatctccaccttcaatatagtctgtaaaattttcactgatgaaacggtagaacaacgtccccaagacgaattgcttgaagtcccatccatctactgccccacgcacttcattggctattttccaaatctgagattgcaactgttctctttgttgtatgcttgtcatattatctacttgcttttattaatgagttccctcctatcaatatttaacaattcagctattcttgaaagagtagccaagtctggctgtgaaacattggtacaccattttgatacagttgaaggatcttttttcaactgttcagccaaccatttgccagtcttctttttctcgacaaaaaccaatttgagcctatttatatctctcatatcaatcattaaattgaatttgaaacaaagataatgaattaattttgtttgataatagaagtagtttacttttctgtacgcatatattttccgactttggaggaaaagattccagcaagtagttttggggcaccgaaaacatttcgggtgccccaaaacacaacttgctatgttcgcttgaacataaaattaagtatagaaattacagcccaaaatagaagaatttttcgttggcaagatgcttgtttacgatggtcatattatctgttgcttccaacaaataacggtcggttggttggtttgcccaattgttggttagtataatggtcggttggtctatattctattgtcattataaaaacggttaacggaatagcaaaaatgccggattgcgcagtcccttgactttaagacaatactcggcatagctattatacggaaaaggtattctcgaaccacattgaaagaagaaaggattattttctggagggagtgcagtttcccgtttgccactatttcattgtgtcctataaaaaacgccctcccttgtttctgaatgaaatattagaaacgcatacagatagacatacaagcctatttcgtatgcatcgtgaattgttttgtttttgacgattgttttttagacattaagtctaattataaacgctgcacctcaacacaatccaaataaatttgtcttttgtattcggtttgcagtttattttccgtcagtcgtttgtttccgtagccgtcaacgtccattgtacagacgtgaaagggaaaaggttttcgggctgaatacgctctggaagaggaagattctgcccgaaacggcaaagccgcctgaccttttcgctttcaatagagtctgtactaacttcaatggacgagcgaggaaatatgcgactggcggttaattattatatggcactgcaaatgcttttctccatatctcccaatttgtcagagagttgttccaaatcctgactaatcttttgggcggttatctttgcgtagatttgggttgtctttatgttggtatgccccaacagtctgctgacggtttcaatcggtactccgttggatagcagaatggtagtcgctgccgaatgccgggcaacgtgataggtcaagtgcgttttgataccgcatagtttggctatggttttcagtatcttgttgcaggttgtgttgctcggcatagggaataccttgttgtcccttgtcatgcctttgtatttttcaatgatacatttaggaacatccaacagacggatattcgattccgtgttggtcttctttcttcgggtgataatccataggttgccgtcaaagaatgtttgcaggttgtcttccgtgagattcttgacatcggaatatgccaaacctgtaaaggtggagaacaggaacaagtccctgacaagctcgtgtgtcttgtcgggcattttggtattcataatggtgtgtatttcctctttggtgacatagcccctgtccacgctttcgggagagttgatataccttgcaaaggggttgaatggcagacggccgtcattcctcgctatggaaacgatgtgtttcaatacaatcatatagccccatatcgtgttggtgcgacatttcttttccgtgcgcaggaaatactcgaaatcgttgataaatgagaggttcagttctttaaggggaatgtcatttcgcttgtaggtgtacggaagaaactcgcagagatgcttgtaaacggtcttgtagcgttggaatgtaccttgagccctgctgtgcccgactttcttggcaaattcgctgttgtgctgctcaaaaagcttcaacagggtttcctgcttgacaccgataccaagataggcatctttgagtttggcagcggtgacatatccgtccgtctgcatcagtttctgataacggcggtttacctccacacggattttatcaacggcatggttgattcgctgtgcttcgacacttttgcccgaagcacggttgtttttcacatcccacaatcgcaggggaacatccatcttgcaactgaactgtttaatctctccgtccaccgtaaggcggtacatcaaaggtaggttgccgttgggtttctcactgcctttcttcacgtagaataagaccttaaatgtacttctcataactcactcttttttggttacaaaattagtttatagtgagttaccgacagataagacaaattatgccaaacggtgaaatctttcggtttcgcaagaaattttcatcattacacgggtaatgataaagtaactgaacttttgcgctgtttggctatattatggttctctttggctttttgccgagagaaaaatatagcgtaacgaacgctttttcagtcggttcgctacgcttttctcatttttgtatgctcgctatgtgtttattttagaatgcatacccgaagccgatattcagatatatagggtacatcgagaaagtgatcgtatggaagtcattcttgaagatattgttgagtccccaggtaaggtcggcgtatatgttgagatgtttgaacgctctccatccggctcctgcctgaagtccccactgaaaacgtctcagatcgtcggagaagtcataagttgcaattttatcatcggtaaattctactttaggtcctgttggatcgtcctcacgcagatatccttcgtatacgtgtcctgaaaattcccttgaaagtatataggaaaaataagggcctgctttcacattccaacggctactcaacttataagtagccatcaatgggatggttaatccggcggtatgtactttggtctttacccctcctgtccatactccgctgatcctttcacctccttgtcccagaatttccatactgtaattctttacggtagcttcggtggtcatagccttgttttcaagccgtagccctacgatgacacccagtttgttctgaaccgctacccatttggtcacttcacccccgattgtaatggcgagagtcggattgtaaccgtcaatagaccggatttccgccggtaagggaagcggagctgtgccgccgatactgattcctgctttcacttcgtattccaatccgcgaagggcggaacggataagcgtttcatttctatccacttgtgcataaccgggcaggacaacacttaaacaaataagcagaccgaatgtataaaggtattttttcatcgctgtaattattataaaatcatttaggttttagttttctgtatgatagaccagttcgacttcatcaatcagcaaggtgcttccgatggctccattgaaataagcgccttccagactggaggtaaagacgattgctacgttgtattttccatcccttagcttttctttgtcgatgaacttgccggggcgggtaataaacggaagtttgaaataagtccattcatctgtttctttggcattgtcgatgcgtgctattgaaaccagattcggactggtgaacgcattacttccgtcaagagtaggaacagactcgctcgtttcgtacatgatggcgtatatatcgcaaatgtcacgttttccgtcaacgggttttccttcttcggtgaacttgtctcccgccttgtatttataataaccggccagataggtcggcacataacggaaaggcagaccgaatttggtagcttgcagcggatagctcatggcattgttcacatcaaaagagccgataaataagtttcctgcggcaatgggcatacccattaactgcccgaagaaaccggtacttcgcgttactaatgaaagacattttccttctttaccatccgctatttggaaagtggggtagtcgtcggctgttttaggaacaccggtcatggcataacccgcatttccgctggcccattccataatcactttgtcttcttgccgttctacgaatatatagtattttttcccaccgagagtgtcctcgaagttgtagttagttgcaagttccgtatcaataaccgaaactgtatatgtttttttccatactccgtcggctgctgtgacagtgtatttttgcggtagattaaaatcgtgtaccgttccgctcaaagggctgatggtagctcccggggtcagggtgaattccggtgcaagggccgaaacgtctgtttccggtcccacaaaaagagttaccgaattattattaatgataggacttgtagtcattactgctttcggcagtgtgcagctaagtatatctgcttctgcgttaagagcttcgtcacggatgcaagaagagatgataatacttaccaggaaatataaaatcacgtgttttgctttcatttttctcttttttcttactgttaaagtttagttctcagaagcgtttataacaaaatgaaattttatttgttcagtaagagatgtatgataaaaaagattttcttacttttgtgtgtacttaaaacttatgagtttatgactgagtcagaaagaaggcaaattatagaactgattaagagagaggtaattccggctatcggatgtacagaacctattgctgtggcgctttgtgtagcgaaagctgccgaaacattggggatgcgtccggagaagatagaagtactgctcagtgccaacattttaaaaaatgcgatgggggtaggaataccgggcacaggaatggtaggacttcccattgccgttgctttaggagcattgataggcaaatcagagtaccagttggaagtattgaaagactgtacaccggaagctgtagagtgcggaaagcagtttattgcggaaagacggatttgtatttccttgaaagataatatcacggaaaagctctatatcgaagtgatttgcaggtccggagatagaacggcgaaagctgtaattgccggtggtcataccacctttatatatatagccgatggaggtaacgtattactggacaggcagcatacaaccgatgaagaagaggaagcgaccgctcccgaactgaacctgcgtaaggtttatgattttgccttgacagctcctttggatgaaattcgttttattcttgatacggcacgtttgaacaaggctgctgccgaacaagcctttaaaggcagttacggacactctttgggaagaatgcttcggggaagttatgaacacaaagtgatgggtgacagcgtattctctcacatcctctcttatacttctgccgcttgtgacgctcgaatggcaggagctatgattccggtcatgagtaattccggcagtggtaatcaaggaatatcggccacgcttcctgtggtggtctttgccgaagagaataataagaatgaagaagaactgatccgtgccttgatgttgagtcatcttacggttatttatatcaaacaaagtttgggacgtctttccgctctctgcggttgtgtggtagctgccacaggttctagttgcggaatcacttggctgatgggaggaaactatgatcaggttgcctttgccgttcaaaacatgattgccaacctgacgggcatgatttgtgacggtgcaaaaccgagttgtgccctaaaagtgactaccggagtctcaacagctgtactgtctgctatgatggcaatggaagaccgttgtgtaacttctgtggaaggtattattgatgaagatgtagatcaaagtatccgtaatctgacaagaatcggctcacaagctatgaacgaaacggataaaatggtactcgatatcatgacgcacaaaggatgctagaaaatgaggagttagaaaatgaaaaatgaggaatgaagaattagctgcgcaatggttgatagcaattcttcactcctcatttttaactcttcattaacttagtggcaacagccgccaccgcattcgtggtcattgcagccaccatcaccgcaactgtcgcatccgcaaccgcagccttcgccactcatcattttcaccagttcctgaatttcttcgttagtagcaggacggctttcaatcacttcgccttcaaagatgagatcggcgcctgccaacggatggttgaggtcaacgactactacatccggtttgatttctactacgctggcatttacgcgttgaccgtcaccggtcatcaaaggtacgatattaccctctttgatatggtcgctgtcgaacttgccgtcaacctcaaagatatttttcgggagatcaatcacgtgttgctcgtcatattgaccgtatgccttgtctgccggaatggtgaagtcaaatttgtcacctttagaaagagaagttatctggttctcgaagtcctcgagtgttgttcctaatcctgaaatgaactgaaagggatgttctgcttttgcttcttcgaacaattccttttcaccatcttccattgtatataatttgtatgcaacggtaatgtacttgttttctactgtttccatctaattctttttatttctaaattaataaatcccgcaaatgcgggctgacaaagatacgaattatttatttctgccgtgatatagggaaggtatatttcaaaatattaaatgcttttgttagaaagggacaataggaatccacttctataatagttgtaaatttaacctctaagtgataaaatagagaaataacacctctcttttcttacaattattcgtttttatgtgatttttttcttcgatttgtttggatataataaaaaagcccttacctttgcagcacaaaaataaagaaaagaagatatgaataacttacacacatctattaacctagcagtcttgcatattattcgcgtcgtggtggtcccatcaagagcgtgagaaaggttttgtgctgtatgtattcgtaccataaagataaaatttagagcctttctcactggtgtgagagaggctttttaattaaaagatagattgaaatgaaaaagcaattacgcagttcgtttagtacacaaggccgtcggatggcgggagcccgtgcgttgtgggtagccaacggcatgaagaagaatcagatgggtaagcctatcatcgctatagtcaattcattcacacagtttgtgccgggacacgtgcacttgcatgagatcggtcagttggtgaaagcggagatcgaaaagctggggtgcttcgctgcggaattcaatacaatcgctatcgacgacggtatagctatggggcatgatggaatgctttactcgcttccttcccgtgatatcatcgcagacagtgtggaatatatggtgaatgctcataaggcagacgcgatggtatgtatcagtaattgtgacaagatcactccggggatgttgatggcggcgatgcgtctgaatatacctgctgtatttgtgtcgggtggtcctatggaggcgggtgaatggaacggtcagcatttggatttgatcgacgcgatgattaagtcggccgaccaaagtgtgagtgacgaggaagttgccaatatcgagcagaacgcttgtcctacctgcggatgttgttccggtatgtttacggcaaattctatgaactgcttgaacgaagccatcggcttggctcttcctggaaacgggaccattgtagccacgcatgaaaaccgtgcgcagcttttcaaagatgctgctaagttgattgtggataatgcgatgaaatattatgaagagggggacgagagcgtgcttccgcgtagcattgccacccgccaagcttttctgaatgccatgactttggatattgcgatgggtggttctaccaatacggttcttcacctgttggctgttgcccatgaagcgggagtcgacttcaagatggacgacattgatatgctttcccgcaaggctccgtgcctttgcaaagtagctccgaacacacagaagtaccacattcaggatgtgaaccgtgccggtggaattattgcaatcatggacgaactgtccaaagctggtctggtggacacgtctgttcgccgggtagacggaatgacgttggcagaggctattgataagtactccattacaagtccgaacgtaagtgaagaggctatcaaaaaatattcgagcgcagccggaaatagatttaacctcgtactcggctcgcaaggtatgtattataaggaactggataaagaccgtgcaaccggatgtatccgtgatttggaacacgcttacagcaaagacggcggcctggccgtattgaaaggtaacattgctcaagacggttgtgtggtaaaaacggcaggggtagacgaaagtatctggaagtttaccggacctgctaaagtgtttgattcgcaagaagcagcctgcgaaggtattctgggaggtcgagtcgtcagtggcgacgttgtcgtcatcacgcacgaaggtccgaagggtggtcccggtatgcaggaaatgctttatcctacctcttatataaaatcccgtcatctcggcaaagagtgtgctttgatcacagacggacgtttcagtggcggaacttccggattgagtatagggcatatctctcccgaagcggcagcaggaggtaatatcggaaaaatagtcgacggagatatcattgaaatcgacattcccgcccggacgattaacgtgcgactgacggatgaagaactggctgcccgtccgatgacacctgtcactcgtgaccgttatgtgccgaagagcctgaaagcgtatgccagcatggtaagctctgccgataaaggagcagtaagattaatcgattgacaaatgatgttttgacgttgagttcaatcgtaaattgtaaatcttaaaattgcaaataaatagatgagtaaagacttaataacaggtgcggaggcgttgatgcgctcattggaacatcagggagtaaatacgattttcggttatcccggcggttcaatcatgccggtattcgacgccttgtacgaccatcgaaataacttgaaccacattttggttcgtcacgaacagggagctgcccatgcggcacaaggttatgcccgtgtgtcaggtaaagtcggtgtttgcctggtgacaagcggtcccggtgctacgaacacgattaccggtattgcagatgcgatgatcgatagtactcctattgttgttattgccggacaggtaggaaccggttttctcggaacggatgcatttcaggaagtcgatctcgtaggtatcacccagcctatctccaagtggagttatcagatccgccgtgcggaagatgtagcgtgggcagtggcacgtgcattctacattgcccgtagcggtcgtcccggtccggttgtgctggattttgccaagaatgcacaggtagagaagacgaaatatgagccgactaaggttgatttcatccgcagctatgtacctgtgcccgatactgatgaagactccgtaaaggctgccgccgaactgattaataatgcggaacgtccgcttgtactggtggggcaaggcgttgagttagggaatgcgcagaatgagttgcgtgaatttattgaaaaggcggatatgcctgcgggatgtacgttactcggactttcggctttacctacggaacatcctttgaataaaggaatgttgggaatgcacggtaatttgggaccgaatataaataccaataaatgtgatgtcctgatcgctgtaggaatgcgcttcgatgaccgtgtgaccggtaatctggctacttatgccaaacaggcaaaagtgattcactttgatattgatccggcggaggtgaataaaaatgtaaaagttgacattgcagttttgggagattgcaaggagacattgaaggctgttacccgactcttgaaaaagaatgaacacgctgagtgggtcgacagtttcacggagtatgagaaggtagaggaagaaaaggtgattcgtcccgagctttatcctgccaccgactcgttgagtatgggtgaggtggtacgtgcggtaagtgacgctacccgccacgaagcagttctggtgacagatgtaggacaaaatcaaatgatgtccgcacgttactttaaatatacgaaagaacgcagtatcattacttccggcggactcggaacaatgggcttcggccttcccgccgctatcggagcgactttcggagcaccggaacgtaccgtatgtgtatttatgggagacggtggattgcagatgaatcttcaggaactgggtacggttatggagcagaaggctccggtgaagattatctgcctgaacaataactttttgggcaacgtgcgccaatggcaggctatgttcttcaatcgccgttattcattcactccgatgttgaatccggattacatgaaaattgcttcggcgtacgagattccttccaaacgtgtcttctctcgtgaagagctggcggacgctatccgtgaaatgttggcaacagatggcccgttcctgctcgaagcctgtgtagtagaagaaggtaatgtactaccgatgactcctccgggaggctctgtcaatcagatgttgctggagtgctagaagaagttgagagttgagagttgggagttgaaagttaaattaaggattatgagtgaaaaaacattatatactatcattgttcattcggaaaatatagccggattgctgaatcaggttacggctgtttttacccgtcggcagataaatatcgagagtctgaatgtatctgcttcttccatcaagggggtacataagtataccattaccgcttggactgataaagatacgattgaaaaagtggtgaagcaaatagaaaagaaaattgatgtaattcaggcgcactactttacggaagatgagatctacttccatgagattgctttatataaggtgtctacccccgaatttcaagagacaccggaggcctctaaggtgatacgtaaatataacgcccgcatagtggaagtaaatccggtattttctattgttgagaagaatggaatgagtgaagaaattacctcgctttacggtgaactgaaggctttgaattgtgttttgcaatttgtacgttcggggcgggtagcgattaccaccagttgttttgaacgggtgaatgagtttcttgacggacgggaagcccgttataaccaaaataaaaaccagcaggaagaatgagcgaatcaaataaaataggaacttataagtttgttgcagaaccgtttcatgttgatttcaacggccgcctgacaatgggggtactgggcaatcatttgctgaattgcgcaggttttcatgccagcgatcgtggctttggcattgcatctctgaatgaggacaattatacatgggtactttcccgcctggcaatcgaattggatgaaatgccttatcagtatgaggacttttcggttcagacttgggtggaaaatgtttatcgcctgttcaccgatcgtaattttgccattatgaataaagaaggcaagaaaatcggttacgctcgttccgtgtgggcgatgatcagtttgaatactcgtaaaccggctgacctgttggcattgcacgggggaagcattatagactatgtatgcgatgagccttgtccgatagagaagccttcgcgtatcaaagtgactaatacacagccgttggccacgctgactgcgaaatacagtgatattgatattaacggtcatgtgaatagtatccgttacatcgagcacatactcgacttgtttccgatcgatttgtataaaaccaagcgtattcgtcgttttgagatggcgtatgtggctgaaagttattttggagacgaactgactttcttctgcgatgaagccaatgaaaatgagtttcacgtagaggtgaagaagaacggcagcgaagtggtttgccggtcgaaagtgatatttgaataaaatagaatataaaatcaattaataacggatggcgtaagccatcaaaactaaaaacaaaaagaaaaatggcacagttgaattttggcggtactattgaaaatgtagtgatccgtgatgaatttccattggagaaagctcgtgaagtattgaaaaatgaaacaatcgctgtaatcggttacggcgttcagggtcccggacaagcattgaatttgcgtgataatggttttaatgtaatcgttggtcagcgtcagggaaagacatacgataaagcagtagctgacggatgggttccgggtgaaactttgttcggaatcgaagaagcttgcgaaaaaggcacaatcatcatgtgtctgttgtctgatgcggctgttatgtctgtatggccgacaatgaaaccttacctaactgccggaaaggctctttatttctctcatggttttgctatcacttggcatgatcgtacaggggtggttcctcctgctgatattgatgttatcatggttgctcctaagggttcgggtacttcattgcgtaccatgttcctcgaaggtcgtggtttgaactcttcttacgctatctatcaggacgctacgggtaaagcttacgatagaacaattgctttgggtatcggtatcggttcagggtatctgtttgaaacaactttccaacgtgaagcaacttccgacctgacaggtgaacgcggttcgttgatgggtgctattcaaggtctgttgttggcacagtatgaggtgttgcgtgaaaacggtcattcaccttccgaagctttcaatgaaacagtagaggaactgactcagtcgttaatgccgttgtttgcaaagaacggtatggactggatgtatgcaaactgttctactactgctcaacgcggtgctcttgactggatgggcccgttccacgacgctatcaaaccggtagttgaaaaactgtatcacagtgtgaagaccggtaacgaagcgcaaatttctattgacagtaactcacagccgaattatcgtgagaaactgaatgaagaactccgccagttgcgtgaaagcgaaatgtggcaaactgctgttactgtacgcaaacttcgtccggagaacaattgatttgataggattatacaagtttgatacaaaaggggagaggttagctttccccttttattttgctgaaaagtctttcctaaattagtgctaaggggcagttttaatcagatcttctaaaaattatcaatggaaaggatgaaatatatatttattcttctgaagctggcgttccggtcttaaggtacacagtttactacttggtggaagtagtaataaaaatattgtttgttttgtttgtgttaaaaaaacggagttcggtttcgtgagaaaggggactccataaaaggaggactattttaatcctccttttttatgaatgccataagtcttttgtaaaaaggatgtttggtaagtgtggcggcttctcccaaaatcaccagtttcatgcgtgctcgtgtgatcgctacattcattcgtcttaaatcattcagaaatccgatttgcccttcctcgttggcgcggacgagactgataaaaacgacatcccgttcctgtccttgaaaaccgtccactgtattaactgtgatgaggcttcggagagggcgcaagaaactgcttcctttaattttgcttctcaaatattgcacttgtgctttgtagggtgaaatcagtccgaaatcaatcctttcctctaaaattcgttcctttccgatccggtttatataggcttccaactcctccaggagcagattagcctcctgcttgttgatgcgtccgaaactttcgcctacaaattcctcgtgaaattccatttcagaagtgtcaatccaactcatggggctgtcgaaatcaaggattccccgataacgtacctccggggcagcctccagttctccctgataaaaccagtcggaagggaactgcatgatagcttcgttcattctatattgcactttcagcaacgagacagaggatggtttttgccgaaccaccttctccattaatgtatattccaatcctccacgagcggcttctatacattttatggtaggcggaagctggcaatgatctccggcgagaaccacccggtctgcttttcggatagctatccagcaggctgcttcgagtgcttgcgcagcttcgtcgataaataaagtcgggaaacggcggccattgagcaggcgatggttgctactgactaaggttgaggcaatcacgcgggcactgtcgaagaggtcggcgttaatttgaatctcaagttcggtagcacggtcgcgtagacggctcatacgactgcgcatcccttcccgttcctcgtaacttccccgccgcattcgtcctcccatttcgcggatggacttgcggattccccaaagttccggatacgccggatggctctcaaaccggcgttcgtaggtgaaggataacattttgtcatttacacgggtaggatttccaatgcggagcaccggaacaccccgatctacaagtttctcgcaaatccagtcgacggcagtattactttgagcgcacaccatcacttgtggttcgcggtgcagtgtctcataaatcgcttcgacaagtgttgttgtctttcccgttcccggaggaccgtgcacaatagagacatcacgtgcgcaaagcactttattgacagccgtctcctgcgtactgttcaaccaaggaaaacgtacggggtataattcgcgaaatccgggctttagcgttcccagcaacgtgtcgcgcagttcggcaaggcgattgcctttggcacggatcacgtcctccagcgcttcaaacatagcgcgataggaagtctcatcaaagtaaagctgtacgcccagcacaccgtcagtttgcagttccatcaatgcccctgctccggggagcacgactaccattcgttcttcgtctgcataactgacggttgcggtgaaattcagatatttcacttttccgtcgaatgactggtggaaaaaggaaacgggacggccgaattcaaaagagtgttctatctctttattttcgcttcttgtaatatctacaacaaattgattcagagagttatagtaacttcggccgagagagacaggataccagcaaagaccgcgtttcacttttcgggcaatacccatcgtttcagtctgccgtttgaattcctctttctcatattcgtactccatccgtaagaggagttgttgttgctgaaggtcggctatcggatttttcggattattattcataataggcgcaaaggtaacaattcttcttcccgagacgaaaatttatttcattttgttaaacattactcgaacgtcattcgttattttaatagatagactaaaaaaacaaaaagtgatatggtatacgatgcaactatgttagaagctttctaccctgcttataaaggaaaggtagaacacgtacgggctatattgaaacgtcctttgacgttggccgagaaaattctgtatgcccatttgtatgatgtggctgatgtgaaagattaccaaagaggggaagattatgtaaattttcgtcccgaccgtgttgcgatgcaggatgcgacagcccagatggctctgcttcaatttatgaatgcgggcaaagatcaagttgctgtgccttctacggtgcattgtgaccatttgatacaagcgtataaaggtgcaaaagaagatattgccactgcaaggctgaccaatgaagaagtgtacgatttccttcgtgacgtatcttcccgctacggaatcggtttctggaaaccgggagccggaattatccatcaggttgtacttgagaactatgcttttcctggcggaatgatggtaggaaccgactcgcacacgccaaatgcgggtggactgggtatggttgctatcggggttggcggtgcggatgcggtggatgtcatgaccggcatggagtgggaactcaaaatgccgaaaatcatcggtgtccgcctgaccggaaaactgaacggctgggcttctccgaaagatgtgattttgaaacttgccggaattcttaccgtaaaagggggaacgaacgccattatcgaatactttggtccaggaaccgaatcgctctcggctaccgggaaggcgaccatttgtaacatgggggccgaagtgggggctaccacctcattgttcccgtttgacgagcgtatggccacctatttgaaagctaccggaagagagcgggtggttgaactggcagagaccgttgccgccgaccttcgtgctgacgatgaagtggctgaggaaccgactaagtattatgaccgcgtcattgaaatagacctgtctgaactcgagccttatataaacggtccttttacaccggacgctgccactcctatttccaagtttgcggagaaggtgttgttgaacggttacccgcgtaagatggaagtgggattgatcggttcgtgtaccaattcgtcctatcaggatttgagccgtgccgcttctctggcgaagcaggttgccgaaaagaacctgagtgtagccgctccgttgattgtgaatccgggttccgagcagattcgtgccactgccgagagggatggaatgatagaagcttttgaacagataggagctacaattatggcaaacgcctgtggtccttgtattgggcagtggaaacgtgagacggatgatccgacgcggaaaaattcaattgtcacttccttcaaccgtaactttgccaaacgtgccgacggcaatccgaatacatacgcttttgttgcttctccggaactgacgatggcactgacaattgcgggtgacctctgtttcaatcctttgaaagacagactggtgaatcatgagggcgagaaagtgaagctgtccgaaccggtgggagatgaacttcctttgaacggctttgcgcaaggaaacgagggttacgttgctcctcatggaggagagacggaaatcagggtgaagccggattcacaacgcttgcaactgttggctcctttcccagcctgggatggtcaagatttattgaatatgcctttattgatcaaagcgcaaggcaaatgtactactgatcatatttcgatggcaggtccgtggctccgtttccggggacatctggaaaatatttcggataacatgttaatgggagctgtcaatgccttcaacggtgagacgaacaaggtttggaaccgttctaccaacacttacggaactgtttccggtacggcaaaaatgtataagtccgaaggagtgccgtctattgtcgtggccgaagaaaattacggtgaaggctccagtcgtgaacatgcggctatggaaccgcgttttctgaatgtacgtgtcattctcgccaagagttttgcccgtattcatgaaacgaatctgaagaaacagggtatgcttgccctcacttttgtagacaaagccgattatgataaaattcgtgaacacgaccttttgtccgtgcttggtttggtggacttcgctccgggacgcaacctgactgtcgttctccatcacgaagacgggacgaaagagagctttgaagtgcaacacacttataatgaacagcagatagcttggtttcgtgccggttctgccttgaatgccagataatttaaaaaagacaagaaaaataaaaatcatgagcaaaataattatgcaagcagatggtacgctgtcagtgcccgatgtgcctaccgtaccttatattaccggtgatggagtgggagcggaagttactccctccatgcaagccgtagtcaatgcggctgttcagaaagcgtacggtggcaaacgccgtatcgagtggaaagaagtgttggcgggagaacgtgcctttaatgcgacaggttcttggctaccggaggagacgatgaaggcatttcaggagtatctgattggtattaaaggtccgttgacgacgcctgtcggaggcggtatccgttcgttgaatgtggcgttgcgccagacgcttgatttatacgtctgtcttcgtcccgtccgttggtatccgggagtacagtcgccggtgaaagcacccgaaaaagtaaatatgtgcgtgttccgtgaaaatacagaagacatttatgcaggtattgaatgggaagcaggcactccggaagcggaaaagttctataaattcctgaaagacgagatgggtgtgacaaaggtacgtttcccggagagctcctctttcggtgtgaaaccggtttcgcgggaaggtacggagcgtctcgtgcgtgctgcttgccaatacgcgttagaccatcatctgccctccgtcacgttggttcacaagggaaatataatgaagttcaccgaaggcggtttcaagaaatggggctacgaattggcgcagcgtgaatttgccgacgcgttggcagacggacgattggtgattaaggattgcattgccgacgctttcctgcaaaatacgcttctgagccctgaagattactcggtcatagccactctgaaccttaatggagactacgtttccgaccaattggcggcaatggtgggtggtatcgggattgctcccggagccaacatcaattataaaacggggcatgccatctttgaagccacgcatggaacagcgcctactattgcgggcaaagatgtggtgaatccttgctctatcatactttcggcagtcatgatgcttgagtatttgggttggaaagaagcggcaactcttatcgagaaagctttggaacagagtttcttggatgcgcatgccacccatgacctcgctcgtttcatgccgaatggaacctccctctccacttccgctttcacccgtgaaatcgtggaaagaatagaaaaatagaagtaacgaataaagacaaagaaaatgaagaaagagtacttgatttacaagctttccgaagagatgaaggaagctacccggattgacaatgaattgttccccaaatttgacgtgaagcgcggactgcgtaacgaagacggcacaggagtgctggtaggcctgactaaaatcggtaacgtggttggttacgaacgtgttccgggaggcggattgaagcctataccgggaaaattgttctatcgcggttatgacgtggaagatatttctcatgccattatcaaggagaaacgtttcggctttgaggaagtggcctacttgctgctttcgggacgcttgccggacaaggaagaactgctttctttccgtgaactgattaacgacaacatgccgttggagcagaagacgaaaatgaatattattgagttggagggaagcaatattatgaatattttgtcgcgcagcgtgctcgagatgtatcgttttgatgcgaatgcggacgatacctccagagacaacctgatgcgccaaagtattgagctgatttcgaagtttcccactatcattgcatacgcttataatatgcttcgtcatgctactttcgggcgttctctgcatatccgccatccgcaggaaaagctttctattgccgaaaatttcttatatatgctgaagaaggactataccgaattggatgctcgcacactcgacttgttattgattcttcaggcagagcacggtggaggtaacaactctacctttacggtccgtgtcacttcctctaccggaacggatacctactcggccatcgctgccggtatcggttcgttgaaaggtccgcttcatggaggagcgaatatccaggtggcggatatgttccatcacttgaaagaaaatatcaaagactggacgaatgtggatgaaatagatacttatttcactcgtatgttgaacaaggaagtgtacaataaaaccggacttatctatggtatcggtcatgctgtctacaccatttccgatccacgtgcacttctgctgaaggaacttgcccgtgaccttgcccgtgagaagggcagagagagtgagtttgctttcctcgaactgctggaagaacgtgctatcgctactttcggacgtgtgaagaacaatggaaagacagtatccagcaatattgatttctattccggttttgtgtacgaaatgatcggacttccgcaggaaattttcactcctttgttcgcaatggctcgtattgtcggctggtgtgcacaccgtaatgaggagctgacctttgacggaaaacgtattattcgtcctgcttataagaacgttcttgaggaactggcctatgttccgatcaagaaacgctgatccgcatcaatcctttttctatataatgtaaaatgttccccgaatagatattgagtctcaattctgttcggggaaagtcttatagaactggaaataataacataattaacatttcgaatagctccctcgtctcctcttatggagaaaagagcgttcttggtgtcaaggaaaggcggtttctgcctaccaagaaaggcgttttaacatcgtgttaaaacgccttttctctatttgatgactttccctttgtatgctgatgtaaatcagtgaattatgtgcaatcgttgcccgcgagtccttctatggtaaattcttgaatccaaagtgtagttgttatttgggtaagtttaatatttaaaagacattttgtgtggctattactttcatttttgctatttttgtgcattacaaaagaacttcaatatgaatttagcagcttttaatctgtttttgggtgtaatgagcttgattgccctgattgtttttgtcgctctctacttcgtgaaagcaggatacggaatcttccgcacgtcttcgtggggagcggctatttcaaacaaactggcttggatactgatggaagctccggtcttcctcgtgatgtgcgtgatgtggatgtattcggaacgccgctttgagccggtgatattgaccttctttttattcttccaactgcattattttcaacgggctttcattttccctttgttattgaaaggaaaaagtaaaatgccgttggccatcatgtcaatgggaatccttttcaatctgttgaatggatatatgcaaggagaatggattttctaccttgcccccgcaacgatgtaccagtccgattggttcacctccccgtactttataataggtactttgctgttttttacgggtatgctggtgaactggtcgtccgattatatcatccgccatttgcgtaaaccgggagacacacggcattatctgccacagaaaggtatgtaccgttatgtgacttccgccaattatttcggtgaaatcgtagaatgggcaggctgggcaattcttacctgttcgctttccggacttgttttcctttggtggacgattgcaaacctcgttccgcgagccgacgccatctggaaacgttatcgcgaggaattcggcgacgcggtaggcacacggaagagggtatttccttttctctactaggagatttttttatcacgaattgaattaagacttgaattaagactagaataaatataaactactatgaaatctaaacttttcactccggtcactttcggccctttgacgttgcggaacaggacgatacgttcggcagcgtttgaaagtatgtgtccgggcaatactccttcgcagatgctattggattaccaccgctcggttgctgcgggaggagtggggatgacgaccgtagcttatgccgccgtgacgcaaagcgggctctctttcgatcgtcagctatggatgcgtccgtccataattccccgtttgaatgaattgacaaaagccgtgcacgatgagggtgctgcggtaggtatccagatagggcattgcggaaatatgtcccacaaaaagatttgcggtgtcacgcccatatccgcttcttcaggttttaacctctattcgcctacgtttgtgcgtggaatggaacgggaagaacttccggaaatggcacaggcttacggaaacgctgtcaacttggcacgggaagcggggtttgatgcggtggaagtgcacgccggacacggttatttaatcagccaattcctttcaccttacaccaaccatcgcaaagacgagttcggaggctcgctggagaaccggatgcgttttatggatctggtgatggaagaggtgatgaaagcggcgggcaatgacatggcggtgattgtcaaaatgaatatgcgcgacggtttcaaaggcggaatggaaatagatgaatccattcaggtggcgaaacggcttctggagctgggtgctcacggactggtgctgagtggaggctttgtcagcaaagccccgatgtatgtgatgcggggagcgatgccgattcgctcgatggcgcactatatggactgttggtggctgaaatacggtgtccggatgttcggaaaatggatgattccgtccgtgccttttgaggaggcttatttcctgaaagacgccttaaagttccgggaagctcttccggaagctcccttgatttatgttggcggactcgttgcccgtcagaagatagatgaagtgctcgatgcgggctttgaagctgtgcagatgggacgtgccttactcaacgaacctggatttgtgaaccggatgaagcaggaggagcaggcccgttgcaactgtggacacagtaattactgcataggccgtatgtattcgatagaaatggcctgccatcaacatttaaaagaaacgttacctccttgtctgcaaaaggagattgaaaaattggaaaagaaatgaatgatataaaatgggctatcattaccggtgcggacggagggatgggaacggaaatcacacgtgccgttgccaaagctggttatcaggtaataatggcttgttacaacccccaaaaggcggagactgtccgcgcttgtttgattgaagaaaccggaaacccgaatctggaagttatggctcttgatttggcttccatgcaatccgtagcttcttttgccgaccggatattagaacgtaaccttcctgtttctctgctgatgaataatgcgggaacgatggaaacgggacttcatattaccgtagatgggtttgaacgaacggttagcgtgaattatgtaggaccttatctgcttacccggaaactgattcctgcgatggtgcgcggtgcgcgaattgtaaacatggtgtcttgcacttatgcgatcgggcgtattgaacttcccgatttctttcacagaggcaaggtcggagaattttggagaattcccgtttacagcaatacgaaactggctttattgttgtttaccattgaactgtccaagctactccgtgataaaggaattaccgtcaatgctgccgatccgggcattgtctctactaatattattactatgcataagtggtttgacccgctgacggacatttttttccggccttttattcgcaagcccgcacaaggggcttccaccgctatcggtttgttgttggatgaaaaagaagccggagtgacggggcaactgtatgctagtaatcgtcggaaagaattatcggataaatacgttcatcacgtgcagagggagctactgtgggaagtcacggaacgttcgttggcacgatggatttcttcctaaaaggaaaaaaggaaaaaaggaaacgcggattaacgcggatttgcgcaaagaaagatcaaattctatttgcgttatccgcgttaatccgcgttttatttattactccgaaccttagatagaaagctctttcaatacattcacaagatctttttttatcggcttgtcatttttaatcgctttgctgaacggtacgtaaacaatttcgtcatgttcgataccgatcattacgttacgttggtcttccatgatagcgtcgatagcggcagctccaagtcggcttgccaaaatacggtcgtgggcagtcgggctacctccgcgttgcaagtgtcccaaaatcgttacacgtacgtcgtattgcgggtattcgttctttacacgttcggcatagtgcatcgctcctccggtcagttcgctttccgccactagtacgatactactattcttcgatttgcggaatccgttcttgataaactcttccaattggtcgacttccgtactgaactccggaatgatggcggcttcggctcccgaagcgattgctccgttcagcgcaaggaaacctgcgtctcgtcccattacttcgacgaagaacaaacgttcgtgcgaggttgccgtgtcgcgaattttatccacagcgtccagaatcgtattcaatgccgtgtcatatccgatagtggtatccgtgccataaaggtcgttgtcgattgttcccggaagtccgatacaaggaatatcaaactcctgtgcaaaaatgcgggcccccgtcaacgagccgtctccaccgatgactaccaaagcgtcaataccttcttttttcatgttatcgtaggctagttgacgtccttccggagtggtaaactccttgcagcgcgctgttttcaggatagtaccgcccagttggatgatattacttacgttctgacttttgaactctttgatttcgcctgtcacaaggcccttgtaccctctgtatatacctttaacttgcaatccgttgtagatagccgcacgtgtcaccgcacgtatagctgcgttcattccgggggcgtcacctccggaagtcaagattccgatacacttaactgttcccataacacaatcttttcattaattagtttgacgtggcaaatgtacaataaaaagttgaaagcaatggttatgaagtttcttttcgtatgaagaaaacattaaaaatgttcaaattgcagctatttgctttcttctataagcgactgaatgtggctatatattttttccatcagccatttgggagtggaggtagctccgcaaaccccgattgactgtacattctggagtagggaagggtctatttccttctcattgtcaattaaatgtgaattggcgttcactttcagacactcttcaaacaacatctttccgtttgaacttttcttcccgctgacgaaaaatatcagatcgtgtgtagccgcaaactcccttaacttgggcatacggtttgccacttggcgacaaatcgtatcgtagtattcgaatgtcgcttccggtgaaatattctgtttgatatacgctacaatttcctgaaactcatccagcgacttggtggtctgcgagaagagacggacacttttattcaagtccagcttctttacttcctctgccttctcgatgacaatcgctttcccgtcggtctgtcccactagtcccagcacctccgcatgaccgtttttgccataaatcacaatctgtttttcatcgttggcggcgtcttgcagaaactcctgtttgatacgtttttgcaagcgtaacaccaccgggcaagtcgcgtcgatgatttctatattattctcgcgggcgatcatataagtttcaggcggttctccgtgcgcgcggagcagtacttttgcattccgcaactgcttgaattcctccctattgatggtgattaatcccatcgttttaagtctttccacctctcggctgttgtgaacgatgtctccgagacaataaagtgtttcgccttttgccaattcctcctctgccttgttgatggccgtcaccacaccgaagcagaagccggaaccttcgtcaatctctaccttaatcataatttgcggtcgttgtctgcggttattgaatgccacttactttgttgaactgttcaaacagccattctttctgctgctcgattgtcaggttcgtattatccagcagcagagcgtcctctgctttccgcaatgggctgacgtcgcgatgctggtcgatataatcccgttgtttcacgttctccagaatctcgtcgaagctggcttcctggcctttcgccttcaactcgtcgtaacggcgttgggcacggatctcgggtgtggcggttacgaaaattttcaactcggcttccgggaaaacggtcgttccgatgtcacgtccgtccatcacaatgcctttttcctttcccattgcctgttgctgcgctaccatttctgtgcgtacgaaatcgagtgcgctgatgggactgactttagacgacacctccatcgtccggattctgttctccacatttacaccgttgaggtacgtgtccggccgtccggtcgccggattcaggcggaatgaaatacggatgtttctgatttcttttctcagcttttccgtgtcgatatcgttcccgtcgaaaatgccgttttctatactatataaggtgaccgcgcgatacatagctccgctgtcaatgtaaatgtatcctacttcgcgggcaaggtctttggccattgtactttttccgcaagaagagaaaccgtcgattgctattgttatctttttcatattcagttcttctgatttgtccgccaaagatacatttattttgaaaatcaaccatgcatttgccgttaaaaggagccggataagtcagaaaggattaaaaaagttaaaaagccggataaaaagacaggaagaggtggacggttatctgaaaatgtactatatttgcccggagacacataggaagacactttttttattaatcattatattaattattttatggaagttaaaaaatcacccaaagcagacttggaaggcaagaagtctacatggctgctcgttggttacgtggtagtgttggctttcatgttcgtggcgttcgaatggacccagcgtgacgtgaaaattgatacaagccaggcagtagctgacgttgtgtttgaagaggaaatcattcctatcactgaaacccctgaacaagcgactccaccgccaccagaagctccgaaagtggctgaattgttggaaattgttgacgataaagccgaaattgatgaatcaactaccattatcaacgaagataatgtggctccggtagaagtaaaatacgtaccggtgcaagttgttgaagaagagccggaagaacagactatctttgaagttgtagaaaacatgccggatttccccggaggtcaggcagctttgatgcaatatttggctaaaaacatcaaatatccgactatcgctcaggaaaacggaactcaaggacgtgttatcgtacagttcgttgtcaacaaggacggtagtattgtagacgcaaaagtagtacgtagcgttgacccgtacttggacaaggaagccctccgtgtgattaacaccatgccgaagtggaaaccaggtatgcagcgcggaaaaccggtacgtgttaaatttacagttcctgtaatgttcagattgcagtaatttgtaacacaataattggggaggctgctttcggcagcctcttttcattcattaaatatttctccatcctcatgtatacagcttctcaactacttgataaaataaataaatatattgcagatatccaatttacccggacaccgaaaggactttatgaaccggtcgaatatactctttctctgggtgggaagcggatacgccccgtattaatgttgatggcgtacaatttgtatcgggaggatgttgcttctatctatgaaccggctgctgctatcgaagtgtaccacaaccacacgttgttgcatgatgatttgatggaccgttcggatatgcgtaggggaaaaccgaccgtgcacaaagtctggaatgataacacggctgtgctgtcgggagacgctatgctgattctggcattccgctatatgacggcttgcccggcggaacacttgaaagaggtgatggacctgttcagcctgactatgcttgagatttgcgagggacagcagctggacatggaatttgaatcccgcggtgatgtgacggaagatgagtatattgaaatgatccgcctgaaaacagcagtgctgcttgcgggcagtcttaagattggcgctatcttggcgggggcgactgccgaagatgcggaaaatctatataaattcggaatgcagataggcgttgcattccagttgcaagatgacctgttggacgtttatggagatccggaagtgttcggaaagaaaataggcggagacatcctgtgcaacaaaaaaacatatatgctcatcaaggcattggatcgtgcggatgcgaaacagagggaggaactgaaccgttggctggatgcggaaacttgtcagccggccgagaaaataaaagcggtgactgaactgtataaccaactggacattcgcagtgtctgcgaaaacaaaatgcgcggctattacacgcttgccatggaaagccttgccgcagtgggagtggctgaggaaagaaaaaaagaactgaagaacctggtgaaattgttaatgtaccgtgaaatgtagctaagttcttgaagcatgccttatagacgattaccaaatacagatcaagcgagagttcgggcgctgaaagcggcggtcgaaaaaggggatgtatataatgtacgcgatttggctatttcattaaagacgctgttcgaggcacgtaacttcctgcagaggttcgaggctgcgcaaatttactatacgcaatgttacgagaatcagtctcgggctagtcgcaagcaccaggcaaatgtgaaaaccgcccggttgtatatttctcattttatccaagtgctcaatttggctgtgcttcgtgacgagataaaagcggtacacaaaaaactgtacgatttgcccgatgccaatgtcgtgcccgatctgttgagtgaggcttcgttggtggagtgggggaagaaaatcatcgaaggcgagcaacgccggacaggacagggcggtatacccatttataacccgaccattgcacgtgtaaaagtgcattacgatatttttctggacagttatgaacggcaaaagaattatcaggcattgaccaaccgtagtcttgatgagctgtcctctatgcgtgagcgtgccgatgaactgattctggatatctggaatcaggtagaagcgaaatatcaagacgttactccaaacgaggatcgtttggataagtgccgtgattatggactgatatattattaccgttccagcgagaaagtaaaagaagaaaattagttatcatgttgatagacacccattcacaccttttcttagaagaatttgccgaagacttgccgcaagttatggagcgtgcgcgcaatgccggtgtctcgtctatttttatgcccaatattgacagtacgacgattgacgctttattatccgtttgtgcgaaatatccggatctttgttatccgatgattggattgcaccctacttcggtgaatgaaacatatgagcaggaattggcaattgtacgtgaacgtttgtcggctcccaattattttgtagctatcggtgagatcggtctggatctctattgggaccggacttttctgaaagaacagcttttggtctttgaaagacagatcgaatgggcgcttgaatatgaattgccggttgttattcatacgagagaagcatttgattatatatataaggtaatggaaccctataagaaaaccgcattaagagggattttccatagctttaccggaacgccggaagaagcggctagactgctggagttcgatggtttcatgctgggcattaacggagtggtcactttcaaaaagtcgacgttgccggaaaccctgttgaccgttcctttggagcgtattgtgctcgaaaccgactctccttatttgacccccgttccgaatcgcgggaagagaaatgaaagcgccaacgtgaaagatacccttgccaaagtagcggaaatttatcagaagagccttgaacacgtggctcaggtcacttctgaaaatgcgctaaaagtgttcggattccgcaaataaggcacgaaaggttttaaattatattaatttacagtatttattcgagataaaaaagggataatgcttcaagaaaagaaaaaaaaggatacatttgtagctgaaaatacagaaaacccatagggagaggtgctcgagtggttgaagaggcacgcctggaaagcgtgtatacgccaaaagtgtatccggggttcgaatccccgtctctccgcagaaattgaatgtgaaacgagaagtgaaaacaataataataatcaattaattaatcttaaaaattagacacacaatgaaaaagttattcgcaattgttgctgtgattggggccttgacatttggctcaactcaacttgctcaggctcaagacgctcctgcagcagaacaaactgaacaacaagctgttgctcctgctgctgaagctacaactgctgctgctcctgctgcagaagaaggtggtattcacaaggaaatcaaagttaaattcattgaaggtactgcatctttcatgagtttggtagctatcgctttggtgattggtttggctttctgtatcgaacgtatcatctatttgagcttggctgaaatcaacacaaaaaaattcatggcatctatcgaagctgctttggaaaaaggtgacgttgaagctgcaaaagacattgctcgtaacactagaggtcctgttgcttctatctactaccaaggtttgatgagaatcgatcaaggtattgacgtagttgagaagtcagttgtatcttacggtggtgtacaggctggttaccttgaaaaaggatgttcttggatcacactgtttatcgcaatggctccgtcactcggattcttgggtactgtaatcggtatggtgcaggcatttgataaaatccagcaggtaggtgatatctctccgacagttgttgcaggtggtatgaaagtggccttgattacaacaatcttcggtttgatcgtagcattgatccttcaggtattctacaactacgtactttctaagattgaagctcttacaagtgaaatggaagattcttctatctctttgcttgacatggtgatcaaatataacctgaaatataaaaaataattcgaaatgagtaagttaacatatagaatatcgtattacgcattgtatgcgatgtttgctattatcctgatcgtgatggggctcttcttcttcggaggagacgctactggagcggcagtgatcccgggagtagatcccgaaatgtggcaaccggcccagacagatgccttactctatttgatgtatgctttgtttggtattgctattgccgctactttagttgccgcagtattccaatttggtgcagctttgaaagacagcccggcagccgctattaagtctttgcttggtctggttcttttggttgttgttttagttgtagcttgggctatgggtgacggtacacctatgcagattccgggttatgatggtactgacaacgttcctttctggttgaagctgactgatatgttcctttattctatttacatcctgttgtttgtaacaattgttgcaatcattgcaagtggtataaagaaaaaattatcataatcaattgagagtactcaattaaaaagtaattacaatggcaaaaggaaaaagaaaagttcctgatattaactcaagttctacggcggatatcgctttcttgttgctgatcttcttcttgattacaacatcaatggatacggaccgtggtttggcaagacttttgcctccacctcccgaagatgaaaagaacgagaatacggataaaatcaaagaacgtaacatcttgcaggtgtatctgaataaggatgatgctttgatgtgcggaaatgattatatcggtgttgatcagttgagacaaaaggccaaagaatttatcgctaacgttgctaacgcagaaaatatgcctgaaaaaacacagaagaatgtagagttcttcggcacatgcatggttaacgacaagcacgtaatttctttgcagaatgaccgtggatcttcttatcaggcatatatcagtgtgcagaatgaattggttgctgcatacaatgaattgagagatgagttggctaaagaaaaatttggggttacttattcggaactgaacgatctacaacagaaagcagtccgtgagatttatccgcaacgtatttctgaggcagaacctaaaaaatacggagaaaaaaagaagtaagtaatgggaaaatttaataagactggtaaacgtgaaatgccggcattgaatacttcttcgttgcctgaccttatctttaccttgttgttcttctttatgattgtaacaacaatgcgtgaggtaacattaaaggtgcagtttacgcttccgcaaggtactgagctcgaaaaactggagaagaaatcattggtgacattcatttatgtaggtgaacctacacaagaataccgtgcgaaaatgggtactgaaagtcgtattcagctcaacgacagctatgctgaagtgggcgaggtgcaggacttcattttccaggaacgcgctagtatgagtgaaggggacgccgctaagatgactgtgtctctgaaagtagaccaaaagacaaagatgggtattgttactgacgtaaaaaatgctctcagaaaatcttatgctttgaagattaactattctgctactaaacgtggtgagaaataattagttaattctattatataaagaaaaggcttccaaatcattttggaagccttttctttgttctgttttctttctacttcactcttttgctccgtagacgaccgtgtgcagtttatgttttatatcttcgtagtcttttcccggatcaaggttgccgtgtaccatcagatacattgggaggaagtgatcaccgggcttgtaaggaggctggcggtagtctttcttccataagacaaatccttgacgttggtagaagccgatacgtctctttgccatttcttctaccggacgctccacttcgagtacaatggggagttttaagtagtcgcatagatattccagcgtacgtttgccgtaccctccgttgcgcaaagcaggattggttgcaaagtgctctacgtaatagaagttaccgaagtcccaataggtgatgaagcctatcggcaagtcgtcatcaaaaataatgttattatggaaattgcctgtccggtcggtgaattcacgtaactgttctaattgccggtactcttccggtggaaaagaatctaccagcagttcttccataaatttgtaatgttgcaggtcagatgtactgattggttgaagtctgatcatgagcttcgggttttaaaattagataatatttctgttttacaatttcattcttatccttacatcaaggaacgtagaattcgattatacgccggatggcacgttggcaaaccggacaaaattccttgtattcgtttgttttcatgcggcaattatgggcagggcgataaatacctttggcagagtaacctccaccttcgtataccccgataggaaacttctcccatttgttggcaggagtaggtatcggagtgcctgccggaagcaaatcttcccatttggaggaaaaatccacccgtgttgatatattttgctcccacggttcgacatccagtggataagtatccgtcatggtatcgttttcgtaaaaatattcatcagccaacccggcaaaactgtgaccgaactcatggactaccactggtttaaacatgggatgatgggcggtggtcagtgtgtaggagttatagattcctcctccgccgtagacgtccgtgttggcaaggataataatgtgctcgtaggggatacccgccaaagcgttatggatagactttattcggctggtagtcagatagcggtctgaatagaaagtgtcgaagtgtgagtggacagccgtctgtttccattgattctcgcgaggaacactaacaccgctatcagtggacgggctggctacggcaacaatattgaatttgtccttcattgagcggaacggctcatgcgaaaacaggctttcgcaggcactttccgcatcttggtaaaacagatccatctctttatccgtatagccttcagcaagtatggcaacgtcaatgcagtctttctcgtttccgttccggagcagataccggtgcggagtgacgtgggacacgcctcgttgatgaatcagtatatcatccggacggacaaggtgtttgtagcgtgccataacctctttgcggggagaatacaaagaaatctccacttcagcaggctgtttgggaaatggcaggagaaatgtattttcgaagcccttagcagtctcttttgcttcgtctgtgctcagccattcatggaacagtgaagagaaagaagtcttataaatagtttgttgagtagcgagatctttaacgatgatttgtccgttgccctccaatggaagttccgaaaggtggtgttgccgtcctgcccaagacggtagttgcgataattcatccaggtaaatattttgtctttccgcatttccggtaaagatataatctactcgtaaagttttgttctgaaagtaatccgcaaaatcttgcgcatggcttcctgcaaaagcgaagaatagtaggatggtacagcaaatttgtttcatataaatagtatatttatgtttttacaaaggtacaaactattggcgacttatccgcctcctataaataaaagtaatagtttatagtatttgttgccgaaaaatcgctaactttgcacaaaagattcatcgttttaaacaatttgatttgaaaatgggacatcatcaaatagatattttggatgagcaaatactgaaactgattgcaggaaatgcgcgtattccttttcttgaagtagcaagagcgtgtagtgtttccggtgctgccattcatcaacgtattcagaagttgacaaatcttggaatcctgaaaggttcagaatatattattgatcctgagaaagtagggtatgagacttgtgcctacatcggtatatatctgaaagatcctgaatcttttgattcggtgacgaaggctttggaagctatacccgaagtagtcgagtgtcatttcactaccggaaaatatgatatgtttatcaagatttacgctaaaaacaatcatcacctgttgagcattattcatgataaattacagccgcttggtctggctcgtactgaaacattaatatctttccatgaagccatcaagcgacagatgccgatagatatagactttgatgatgatgaagattagtcaaatcatctcatcaaccgatagtgacagatgagatgataagattgcgctaagcggaagtcagttatttccttgtgtaatcgacaaaagcatacgagcagagatgtttctcgtccgcagggtgagtctctctgcttttttcttgccacacagccggagagacctccggaaagtacacatccgcttcgggagctgtactgtctatttccgtcagacaaagttcgtcggcgaatggcaacgcttgttgatagatacttgctcctcctatgatatatacgtgttcatcttctttgcaactctgcaaagcggcggtgagcgaagggaacacttccgcaccgggacattgcaatgccggattggaagagataactacatttctgcgattcggtaatgcacctttcggaagtgactcaaaggttttccgtcccataactatggtatttccggtagtcaatgccttaaaacgtttcaagtcgttgggcagccagaacaagagtttattttggaaacctattgctctacggcggtctagggcggcaattattgatattttactcatattgtccttaattccgcaacactattacaaatataactttttaagtacctgagcaacaaaaagttgctcaggaatttgccatgtcagatttttcacctatcttagtgttgcaaatcaaaatatgtatcaaacccgacagacatggcaaaggtagcaattaaatccgagaaactcactccttttggaggaatattttcaataatggagcaatttgactccagactctcatctgtaatcgactcaaccctcggtatgagatgcaggctgtatggttatcaatacagcgaaatcatccgttcgcttatgagcgtttatttttgtggcggctcatgcatcgaggatgtcaccactcatctgatgtaccacctttcgcttcatccgacacttcgcacatgcagtgccgacacgattcttagagccataaaggaactgacccaggataacatttcctacacatccgacactggcaagacctacgacttcaacacggcagacaagctgaatacactgctcctcaattgcctattgtccacagggcagctgaaagagggcgaggggtatgacgttgacttcgaccaccagttcatagaggctgagaagtttgatgcgaagcctacatacaagaagttccttggttatcgccctggcgtggcggttattggcaacttgattgtcggcattgagaacagcgacggcaacacaaatgtccgtttccaccagaaggacacgctgaagaggttctttgaaaggtttgaacaaaacaagcttattatcaaccgtttcagagctgattgcggctcgtgttctgaagagatagtggaagagattgctaaacactgcaagaccttctatatccgtgctaaccgatgcagttcgctctacaatgacatctttgccctcagaggttggaagaaagtggaattgggcggcattgagtttgagctggcctccattctcatcgagaaatggaaagggaaggcataccgtcttgtgattcaaagacagaagcggatagacggcgaactcgacctgtgggaaggagaatacacctaccgctgcatccttacaaatgactacgagtcttccgagaaagagattgtcgaattctataacctccgtggagggaaggaacgcatcttcgatgatatgaataacggattcggctggaacaggcttccaaaatcctttatgggagaaaacacggtgtttcttctgcttatggcactcatacgcaacttctataaattcatcatggcgaggcttgacgtgaagaggttcggactcaaagcaacaagccgcatcaagacgtttgtctttaagttcatctctgtgccagccaaatgggtcaggacatcaaggaagtatgtgctgaatatctattcatgcaacaatgcttatgccaatgtgttccagaatgactttggataacaccgacaacttatagtcgtgattttgcgtattgcctcaagtcgcatggtggggtaaggggcatttatatgtctttatggtgacattcgatgcactgtgccccctttttactaacgatgcagattcttttcgcttctgtatcatattaggcgcgtagttgcggatttgaggattgtcatacagctactgcacccgctatgtgaggatgcgggtcataatttactaactcaaagtcctcgaatttgaaatcgaaaatgctttttacatccggattgatgttcatttgcggtaacggacgaggctcgcgtgtaagttgtagtttcacttgttccagatgattcaggtatatatgagcgtcccctaaagtatggatgaaatctcctgctttcagtcccgtcacttgcgccatcatctgcaacaataatgcatacgacgcgatattgaaaggaacacctagaaaaatatcggcgctgcgttgataaagttgcaggctcaatcggccattcgccacataaaattggaaaaaggcgtggcaaggcggcaagttcatgttgtctaagtccgctacattccaggcgctaacaatgatacggcgtgagtccggattgtgtttgatcgtttccaccgtttcactgatctggtcgatgaatcccccgttgtagtcaggccacgaacgccactgatacccataaatatgccctaaatcaccgtttgcatccgcccattcgttccagatgcgtactccatgctcttgcagatacttcacattggtatctccttgcaagaaccagagtaattcatatataattgattttaaatgcaatttcttggtcgtcaggcaagggaaaccgtcctcaaggttaaaacgcatttgatgaccgaagacgctgatggttccggttccggtacggtcacttttctctgtgccttcggttaatacacgatttaataaatccaaatattgtttcataatgaataaatttcaaatactatacgtacgcttgcgcaaaatgatatatacgttcgctcaatactatatacgcttatgcaaaattacaaaaatggagtgaataaattagcaaaccatcctacgaacttcttccagggcgaacgctttttccagaattcgggagtcagttgggtgcaatcccggatgtcttcgtgaaacatcgtgttcagttcgcccgttatccgtttatcaaaaataaaagcattggtttcgtagtcataccgcaggctgcggctattcagattggcagtccccactgtgcaaaacagatcatcgaccatcatgattttagagtgatggaacccgccgttatacatatagaccgttgcccctcttttcatcagtttgtgaagtttgtagagtgcggcgtctggggtaaatggaatatcggaagcggaggaaaccatgattgtcacatccaccccccgatcaatggttcggtaaagcgcctttttgattgaagaggtcggcacgaagtaaggatttacgatgtgaacgtttttttgtgccgaataaatactcatcgcatacgcgtggctcagcattcggctgttctttttcggagtacggtcaacgattgcgacaatgatgtcggtactatccgtcttgttctcgtggagtggaaagtaggcagctcctcctacattttgtttggtctctttgttccagattgtcaggaagatttcctgtaagtcattgaccgcgtctccctctatgcgcatatgcatatcacgccaggtccctattttaggcagaccgttgatatagtaatctgctatattcatgcctcccgtataagctattttcccatcaatgacagctattttccgatggtcgcggtgggcagcgtggttgatataagggaatgtgaacggatcgaactttacaatttcaatgccctgttcacgtattttcttgagatgtttctttttcagaggtttgttgttagaccagttgccaaaagcatcgaacatagcacgtacctcaaccccctctttcactttctgagccagcaagtcgaatagggcattggcgatggaatcgttgcggaagttaaagtattccagatgaatatgatgtttggcttcccggatagcttcgaataaatcgataaacttttcccgtccgcttttcagtaactttactttattgttgtcggaaatgggtatgccggactcttccagaaaacgtaatacaagtgagtcacttgcaagtccgatcgagtctctgggttgtgtttttagactgtctatgatgtctgcctgagcgtgtaataaagacaggaacaggaataaaataaatatacgtaatttcaaaacttttctctctattttagttttacagttcaacaaagatacgacatctatgtttgggcttgtttgagagaaagggtatatttattattgtttaacagacgaagtgcttttataactcttatgctattgataacttttatgccatcgatgcaacttttcgtgttgccataaataccaggacgacagaggcgataataatcgatttcggatccagctccgcagtgccttgattaatcatgcttatgaacacttctctgattgttccccaagcagcttccaagccgcccatccaaatgaaaagcacagcgcccgcaaccaccacggcagcgttccagatgcgtgccaaccaattgctacgatcgggcaagcgatgcatgacacggcggctgaagccattatcagctatttcctgtttgttagccgtgaagaaatccttcaaaagcttctcgtcattttcaatttttgtcataaccgttttgttttaaatacgttgctaacttttcttttccacgcgacagatggcttttcaccgtccctgtcggtattcctgtaattcccgcaatcttttcgatacttaaatcttccatataaaaaagcgtgatgcaggttctttctatttctttaagcgtcttgagcgatcggtagatatccatcttttgaccgatgttttcctgttcggcactgttggcggcgtctatttctctggcgtcaaggtctgctgtttctttgcggctgcgaatataatcataaaatatattgtaagcaattcgatacagccacgtggagaaactggacaaatttctgaaagaagcaatatttgtatacgctttgataaacgtgtcttgtgccaggtcgtcactcaattcgctgtctccgcaagtcagattcaggaagaaccgccggaccggtgattggtacttcttcaccaactggtcgaaggccttagtgtttctgaacaccacgacctgcgcgactagcgatatatcattgagttggttcatctttgactgtcattctcttgattttcatctttctttctaccgatgatccacttcccgattcccatgaaagtgattagcagaccgatagtgccgattgaaaattcaccggtaatagcccagaggaagatgaaaagtccgattcccgtaaagatgtttttgatgccttgcgtacgcggatcattcggcttgtcctccttgaggaaatcttccggaagcggttgtccggcagcaagagcctgttcgacaaggcgatagcgggctttccggttcttgtagcggaagaagaaaatgatgaataggataaacaccggaaaaccgaagactgcaatgattgcgatgataggaatcagaacatcctccatcgcattggataggctgtacagaacgctatgattacttgtgtccgtagcagtaacattctctttggcgatagagtcggttgtgtctgtgtcaactaccagagtcggttccgcctgactgatggagtcgtgggcaacaggattctgattttgagcgacagccagtgtgcaagtggtcaatacaaccatcaaagcaagtagaaaatttttcatatagatcgtttttttaatttgtttctttgtttgttagacgtagttaatgacttagaaagttgcaaagagacgaaatatttttgatatttgcggaaattaataaatgaaaaatggaattacccgcttcttttgtagactatacccgctctttattaggtgaagaagaatatgaaaaactggccgttgccctgcagcaagaaccacctgtcagtatccgctttaacaatgaaaaatggaaaatgcaggatgaagggttatctgctgtccattctcctttcgaccgagttccttggtcgtccgaaggggtttatctggacgaacgcctgacttttacattcgatccgttgtttcatgccggttgtttctatgttcaggaggcctcctcgatgtttgtagagcaggcattacgccaatacatcaaagaaccggcaataatgttggatctttgcgctgcccccggtggaaagtctacccatgcccgtagcgtgctgcccgaaggaagcctgctggtggctaatgaagtcatacgaaaccgttcacaggttttggcggaaaatcttgcgaagtggggacatccggatgtggtggttaccaataatgatccggcggatttctcggctttaccgtctttttttgatgtaattctcaccgacgttccttgttccggtgaaggaatgttccgcaaagaccctgtggcgatagaagaatggaccccggagaatgtagagatttgctggcagagacagcggaggattattgctgatatttggccttgtctgaagcccggaggcattcttatatatagtacctgtacctttaatacaaaagaagatgaagaaaacgtacgctggattcagcaagagttcggggcggaactgttgccgttggaagttcgggaagaatggaatataacaggaaatctgttgaaagatgaatcgaccgggaccgttcatttggagggcactcccgtctatcacttcttccctcataaaacgaaaggagagggattctttctggctgttcttcggaaaccgtgcatagaaacagatgaaaacgaaacgaagaaggcatgggaaaccatcaattcacagaagtctgcaatctcaaaatctacgatagcgcgagctgcaaagaaaaaagggaaacacgctgggaaaggagttccgtctgtcgctaaagagttgatggacgtagcccggagttgggtgagggacatcggcaactattctcttctgaccgatgcggaaaccgtttacgcctttcccaatgctcgtctggaagagttggaagcacttcgacagaatttgaaagtgatccagtccggtgtgtcggtgggtgaagtgaaagggcgagatttggttcccgctcatgcgctggcactgtgccctgtgctgttgcgtgacggcgcttttgccgttgaggacattagctatgagcaggcgatagcttatttgcgcaaagaagctattgtacttcctgctgcggtggctcgcgggttcgtgttgcttacttatagaggcgtcccgttgggcttcgtgaaaaatatcggcaaccgggctaacaatctttatccgcaggaatggcgcattcgtagcggctatctgccggaggaacttcggatactgtaaatttctcggcacaattaaaaaaaaacaggataagatcagctcgataaatcttatcctgtttactttcataagtagataaatacctccataagtagataaataccttttatatttataatttgctcttgtagatccgcgccattgccttctggtattgattttccagttgcagataattctggtggctctgatagagcacggacacctccacaaagtactcaatcatgctgatttgtcctccggtcaaggcctgtttgagcaaggcaagatcttgttgcgaccggaaagtcctcgtgtactcctccatagaagcatgaagcgttttggcttcccggtaaagctgtgccagttcggattctacctgcaaggcggcattatccctttgcagatctatgttcagagcctgtgctttggcaatcttcaccttgttccggttttcgaaaagagggaaagagaatcccaccactaggccgttgaaaggagtacccgattccgtgttccggcggtagcccagctccagtttcggcaaccattgcgacttgttgacagcaatttgtttgcgggcgacgaggctctcgttgccaagcgccatcaacgtgcggtctgccgataacacctccgatttcagtatctgataatcagtcgggaaaggcacggccgggtattggctctcctcgaaaacaactggaagatttccgttcaacgtactcaattcctgcaatttattgcgcagcgccgtttcgttcagagacacttccgtcttgacattcagcaactccagattgatcttgttcgtttcgagcgcattggcatctcctgtctgcaggcgtttggcgtacattttagcaagttcttccgcattgcgcaggcgttcttctaaaatctgcttctgctggcgaagcataatgatgtccaggcaaagctcctttgcctgcaataacttctcctgccggaagacatccgcctggctgtcgtaagctccgattttcagacggttcagcttgttgcgcgtggcgtataagctggggaagtcgaaactctgcgaaaccaccagctcaccgattgtttcacttttatctttcgagccccagaggtgtgcataggaaagcgtaggatcgggcagattgttgtccgttctagcctccagcttttgcgactgaatcagctgcttgttagcctgcagctccttgttgttcgtttcgatatttctcaaaacctgctcaatgctgttctgggcttgtgcactgcctgcgttcaggagcagaagtgccgcgccgatagttatgatttgtttcattttcatcttctttattggttgtaaattgcaattacagacttgctgaagccttcttgcggtgcatcatcagataaacaatcgggacgatgaatccgttcaggaaagtagaagttaacaagcctcccagaatcacttttgccatcggactctgaatctcgttgcccggaagatcacctcccagagccagaggaatcaatgccagagcagaagacaaagccgtcatcaggatcggattcagacggtcgagcgagccttgcatcacgctgtcgtacacgttcagcccctccacttgttggagatgattgtaatggctgatgagcagcataccgttacgggtagcaattccgaacagagagatgaatccgatgatagcgggtatactaacttcccccgttgtaagtaccaatgcgaaaacgccaccgatcaacgcgagcggcaggttcagcaggatgactcccgactccttgacgctgcggaactcatgataaagcaatagaaaaatcacaacgatgctgataaatgaagtcagcgctaatgtcctgctcgccgcctgctcgctctcaaactgcccgccgtattcgatgtggtagccttcgggcaattgcacggatgcgtcgatctgcttccggatgtcgtttaccacactgcgcaagtcgcggtcggcaacgttggcggaaatcacgattttccgtttcacgttctcacggttgatggtgttaggtcccatagccgatgtcacttccgccacatagcttagggggactttacgtccgtcgttcgtgtccaccatcaagttgcggattttctccatctcgtcacgggcatcgttcttcaccttcacaatcaggtcgaaactcttgccttgttcgtacacctgcgagatcacttttcccgccagagcgacattcacgtactcggaaaactccggcagtgtgattccgaacttggccagcatttcgcgtttgggctgtatttttaactgcggacgttcgatctgctgttccacattcaggtcggcgatgccgggaattgcgccgatcgcctctttgatctgattgccgatggaaaacatcttgttcaggtcgtcgccgaatagcttgatggcaatatttgctttcgtaccggacaacatggcgtcaatccggtggctgatcggctgtccgatttcaatgtttgctcctgtaattgtgcccagcttttcacgtacatccgccaccagttcgctgcgcgagcggtcgcccagttcaaacggagcctcaatttcggacacgttcacacccaatgcgtgctcatccagttcggcacgtcccgttttgcgggcaacggtttgtatctccggaatggtcagcagcaactcttccgcgcgctgtcccattttgttgctctcttccagcgagatacccggcagagaactgatattgattgtgaacgaaccttcgttgaaagaagggaggaagctacgtcccagcgtgaagaacacaccgagcgccacgatgaagagagcgatagttccacccagtgtcacccgtttgtgcgccagcacccaagacagtgccttttcataaatccctttcatccaacgggctacgaaagactctttcagttccttgttcgtcttgttgcttcccaacagataagagcagagcaccggagtcagtgtcaatgctaccaccgtcgaggcgaataacgccacgatgaaagcaatacccagtgggaccagcattcgaccttccatgccactcaggaaaaataagggaacgaaactgactacaataattaaagttgagttcaaaatcggcatacgaacctccttcgaggcgttgaacaccacttcgagcgtgctcaatctttccgcttccgctttcagccggttttcacgcaagcgcttgtatacgttctccacatcaacgatggcatcgtccaccagcgaaccgatggcgattgccatacctccgagactcatagtgttgatagtcagtcccatataatgcagtgtcaggatcgaaacgagcagtgagagaggcagtgttaccagcgaaataagcgtagtgcgcacatttgccagaaacaagaacagaacgataacgacaaagatacctccttcaaagagcgatttcttcacgttgccgatagaactttcgatgaagcggctttggcggaaaatgtccgtagaaacctttacatccggtggcaggttcttctgaaggtcttttagcgaagcctccagcttgtccgtcagttccagtgtactggtggcgggctgcttggtcacagtcagcaggacggcaggttttccccgttccgaagccgtacccaatttgggtgctttggggcctattgccacgtctgctatatcttccagagtgacaggaaagttgttcaccgtctttaccaccgccttgccgagctgttccgtctgagtggtggaaagcacgcctcgcactatatattcatttccgaattcgtaaagcactccgccgttggcgttcaggttcatgtcttgcgtcaccgccatcacctcacccatcgaaacgccgtagtgacgcatccgctcgggatcaagctgaatctggtactctttgatgtctcctccgagcaccgctacttgcgccactcctccggtagacagcagacgcggacggatagtccagtcggcaatcgtacggaggtcgagcatggaggtagagtcggccgtcagcccgacaatgagcatttcgcccagaatagaagattgcgggccgagtgtcggttttccaacgttgaccggaagcgattcactgactacagcgagcttttcactcacaatctgccgggcaagataaatatctgttccccagtcgaattccacccagacaacagaaaaaccattggtggaagaagaacggacacggcgtacgccggtagctccgtttacggcagtttccacagggaaagtcacgagttgttcaacctcttcggcggccataccattggcttcggtcatgatgacaaccgtaggcgcgttgaggtcgggaaacacgtctacttccgtgtgcatggcagtatagctccccgcaatgagcagaagaatggaagcgcagagcaccagcaaccggttgtgcagggaataatgtatgattttattaagcatctttttaaattaagaattatgaatgaggaattaaagatgaagattcattcttcatttaatcagtgttcatggctgtgtgcggggatggcattgcttgcactggccagtcttacctggtacgctccttcggtcacaacgcggtcgcccgctttcacgccggacaggatctggacattttttccgttgtcggctcctacggtcacttcctgtttcttgtacccttcctcatccagttgcagatatacaaagtagcttccttgttcctccgtcaatgcggtgcgtggaagggaaattacgttttccattggcgacgagagcaggaaaacctctacgaatgagccgggaatcacttcacctttgttatcgaactcgaaggtgacaggcacgtagaaagaattgtctccggcagttttcccgaaagagaggagtttgccgttgagcgcttgcagttcgtataccttattattataaggagtctggaaattggcggagctgattgtgcggaggtacgggtagtacttttccgacacttcggcgcggaggaacagacggcggttctgcgtcacgctaaccaggggttgtccgatggtcacgtagtccccctctttcaccagtatacttttcacatagcctgcgatgggagctgtgatattttgtccgatagccgaatggttcttcgaaagggcctcgtagctgatgcgggcgttctcgtaattctgctccgcctgtgcaaactccttgtcggatacgattttgtttttgacaagggctttcatccgttcgtactctttcttcgacacctcgtaggcgatgcgggcacgttgcaccgggtcaccgtcggctatattgtttgaagaaatggtgaccaacggtgtgccgttgccgacgctcattccttccgtcacttttccacgaaaagaaacaacgccagctacggtagctacggcaaccgattcatccccctgagcagcaagtacttgtccactggttttaatgacctgttggaaaggagcgggctcgatgatactagcctttactccggctgcttcggctttcactttcggaaggatgatctcgtcactatgtgcttcggccgtttcgaggtggctgcctgctgtttcgtgactgtgcctttcaccggattcatccccgtgggcgctgtggtcgtgatcttctgtggcatgattatgtccttccgcctcatgatcatgctcgttgtgtgtatgtgtgacggtactattacaagaggcaaggataaataaacccagcactccgaaaaaaataagtttcttcataaatgatatttcctacttaagttttttgttttctttttgttgttgcagattcatactgcaaaaatacggcaaggttcttgcaactggcttgcaaagattagttacaacgcctttgcaactgacttgcaagagcgtttttaagcgaaaacagagtagggaggtgcgcgaagcgaggtggcacggtagaaatccgtgctatgcagagagtctcggaagacgtaatagttctttacccgtttctcctgcgggcgtagtaaatgttcgataatgacatcggtgaacagcgtagcgataaatacataatccggactgctatagctgtgtatggatgggatggacgactgaaagcgtgtcagacactcgctgttgcaacaggcgtcgctctccggatgatgatggtgcttggggcattgttgctctacgggcaagtcctgcttcatgcaaatcattccgttagggtggtgatgatggggaataacggctgccaccaacatgataatgttgataaaaaacagcagagttactatgattctttttttccctttcatccctaatttcgtagagaatttatttcttaatcgattctttttccttttcttgcagacgttccagcaattctgtggccgagacataaatcactttcccatccggtgttccttgactaaggagtgtaccattacgggaatttttctccaacagtctcttttctgccaactgaagaccgcgccgtaatttatcgctcaattcttgcatttcattatttgacataatttttgatgcatttaaaaagttcaagttcatatatccggttctctccgtgtcgggtaccttcggccacaatcactcggggagaaacactgttgtctgccagtaaccaataatccacacacggcatatatatctgaaacagattgtttatacctgcttgatagcggcggtagataacgtccagaggcacattatgtcccccttcattgactcgttgtaacacacggttcactgcaagttccggagaattcagccagaaataaataaggctgactttatatccttcactttgtgctcttttgataagccgggtgtatgaacgtgtggctaacgttgtctcaatagagaaactgactttagcagccaacagttcatctatgcgtttcaacattagtcgtccggcttctatagccatactttcgggattgaaaggagacaagccttttgctatttcatccgcattgacaaactccttgcatagcagaatttccggcagtacggtataggaagcagtggttttgcctgctccgttgcatccgcttataatgtataactgccttgcctcatccattccttttaagtacctgctataaataatgttacaaagatacaaattctttatcttctcccggaatccgaccccttctttttattatttattatttcttttccagctcttgcaacgaatccatctttttcttttcgaggaattcatagataccgcataggtgttccgtcaccttctgattgccaaactcataaacctttgataccagtccgtcgaggaaatcacggtcgtgcgaaacgacaatcagcgtgccgtcaaaatcgagcaacgcctgtttcaggatgtcctttgttttcatgtcgaggtgattcgtcggctcgtccaggatgagaaggttgaccggctccagcaatagcttgatcattgccaggcgggtacgttctccacccgaaagcactttcactttcttcatcgactcctccggaccgccaaacatgaaagcacccagcaagtcgcggatcttgttccggatttcccctttcgctacgtcgtcaatcgtctggaacacagttagattctcgtccatcagtgaagcctgattctgtgcaaaatacccgatttgtacattatgtcccagcgtcagcgtgccatcgtgctctatttcccgcatgatacatttgacaagcgtagacttaccctcgccgttcttgccgacgaacgccaccttgtctccgcgctcaatcgtcagattggcgcctttgaacaccaccttctctccatacgttttcccaacattctccatgatgaccggataactgcccgaacggggggaaggcggaaatttcagacgcaaagcggaagtgtcctcttcgtccacctccagcagttccagtttctccagcattttcacacggctctgtacctgcaaggtcttcgagtacgtccccttgaaacgttcgatgaactccttcgtctcggcgatgaacttctgctgctcatcgtacgccttctgttgctgttcgcggcgttccttgcgcagttggaggtattgtgagtagtttactttgtagtcgtagatgcgccccatcgtcacttcgatggtgcgggtcgtgatgttgtcgacaaacttgcggtcgtggctgatgacaatcaccgccttgccgttattgatcaggaaatcttccagccattggatagactcgatgtcgagatggttcgtcggctcgtcgagcagcagcacgtccggtttctgcaacagtaacttcgccaactcgatgcgcatccgccatccgccactgaaatcactcgtctgacgtccgaagtcttcccggcggaaaccgagtccgagcaacgctttctctacatcctcctcgtagttcgtggcgtcgattgaataatacttctcgctcagggaggatacttcctcgatcagagccatataactgtcgctttcgtagtccgtccgtgtctccaactccttgttcagtttctcgatttgcgcttccatttcgtgcagatgcgcgaaagcctgtgccgtttcgtcgaacaccgtgcgtccgtcctccgtcatcaagtgttggggcagataggccaccacgcactctttcggtgcagagaccttgccgcgtgtaggttgcctcacgcctgccagaatcttgagcagtgtactttttcccgccccgtttttccccatcagggcgatgcggtctttttcattaataacgaaagagatatcactaaataaagtcgtgccgccaaattctacggccagtccgtctacagaaatcatattattcttttaaattgaggcgcaaagatagcgaaatatatgaatattttttatatcttgcgggctgaaataggatattaacttgttgaaataagatattaatttgttgagacaggatattaacttaagtatatagaaggatgtagatggaaaataatatactaaataatatggaaagtacgcaaacatctgaattcagaccgcttatacttgtggctgaagacgacgacagcaactttaaactgattaaagcgatcataggtaaaaaatgtgatatcctgtgggcgcggaacggagaagaaatggtaaatttatttcaaacacacggcgaaaatgccaaagcgatgttgatggacattaaaatgccgctgatgaatgggttggaagcgacgaaaattattcgtgagtccaacactacgattcccattatcatgcagactgcctacgctttcagttcggataaggaaaatgcgatgaaggcgggagctacggaagtgctggtgaagccgattacgctaggggttcttcgtggtacactaagtaaatatctgcccgacttgcagtggtaaatgaataataaaacgcagattaacgcaaattatcatagaaaagattctataagtcattgattaatatatcaattgaaatgaattagtcaagacttggagcctgtttgaataatctatgctaacttgcgttaatctgcgttttgatatatcccccccccttttttgaggaggggagaaattagttcttatggctgagagccggatgtatcgtcgggagtagtaacaggctcaacccacgtttcatcgtcatcccatccggtgcggcggaagcctttgatggtgtacgttttgccttccagcgtatatttcacttcgatgccgtccgctttcccgtttgtcggagtcgtaacgctttctaaagtgacttttccggaagtgactgtaaattcccctacgggagtcgttccatcggcaaccatattgcctgctgtcccgttaaaggtgagttcttccacattacaactgattttgcctagaataccttgtttgaaaaggcttgtattcggcaacttgatccacaacttgtccttatcattatctgctgtattgtacagatacatataagttccgtagacgttgtatgattcgtcatcgtcctctattgtgctcataaccaattcctcattgttctcgtccagcactttgacgtaatattgtccgcttagcgggtatataggggcaaactcctgctcatagtctccataagtgtcgcatgacacgaaagtgaccattgcgaacatcaggactaataaataattaatagatttcatgtatatatcctttctttctattgttcaatatccttattattttttatgccaccacagaggttcggtaattgccggaactttcgtaggcgcattcgtattatagtccaacgactcttttgagtagatgaagcggtgagcaaactgacccttagctaacgaactgttggggttatatgccagcgtacccaaaacgtaatcatccggatcaccgtctgttgtatactcgctgacttccggaataccggtgcggttgatatcgaaccatgcatcccaagcctggcaacgggtgctggcaatccatttctgggtaaggatacatttcagcatactttcttcgtcggtgtcttggaattcgtaaggttttccaactgcaataaattcagcagctttgtcgccatggttccatctggcgaaagaaaattcaacggctttgtcataatgagtcttggcactgcctttgtctcccagccgtgcgtagcattccgccaacaggtattcggcttcggccgctgacatataataaacaggatcggtagcaccgattacggcacgcgaagttgttgaaatgctatatgcgctggaagttctgtttccataaggaatcgctctgtattcggttctatcagatgcggcagtcttttcgtaaaagtctccgatgcgcggatcttcatattcggctagatagttatacaacgtcgtacaggcgcgtacattatttgtcgtattcaactgtcggcggtcattttcatagaacggattggacttatttacgacatcctcgaaacagtgtaccgttgcgtcgtctttcagaaaatcaccggcagcgagcattgtttgtatctccgccttgttcgtgtcaaagtctctcatgagcaacttcaactttaaagttttggcaaatctgatccatttcgcgatatccccgtcatagatataatcttccacgttcatggttttcagacctttggcagaggcttccgcttccttgtcgattgcgtcgtccagcattttgataatgccgggataaaccaccgttttactatcgtcgtatttgcagttctgacctttcagggcttcggtgaaaggaatatctccataagcgtcggtgagcacgtgataagtaaacgcggtcatgatttttccgaccacccaatagttccacgcaccttcctcttccgatttcttgatgacgagatcgagatcaggcaaaacgtccgcgtacggaattctccacagacggaggtcgctggaagaagtcatcgcatagttgaccagcgtgatatattggctggatgacggattctgcgtgtagtgctgtgaccacatagaaccgtagagttggtacaaataccccattacggcagccgagccggtgaatgcggacggcagtaacgtcgttaccgtcacttgtgattcgtccggataattcggattcttgttgacgtccagatagtcctcgcaagaggtgaacgtgccggacaggatggcgcttaatacacctatatataaatacttgaattttttcatcttcgatcgtttttttagaatacaactttaatacctccacctatattgcgcgtagaaggcaaggcggcaaattctcccagttcggaagcgatatcgttaccgaaagttgtggtttccgggtctacgtaattgttagctttcggagtccacataaagaggttgcgtccgatcaggctcaggtctagctgctggatacccagtttggaaatccatgctttcgggaatgagtaagacaagaccagttccctcagtttcacataacctttcgggatgatgaagttctcgaactggctgtctgagtaagagtcgctgtaataactgctcatgttgtcgctggtcacgggacggttgttttcggcgtagcctccgtccttgagggcgattacggagttgggcacgacgaacggttcgcggttgttgaacagcgagcgggtagtgttgccgacgaagtgcatcagttgtgcggtgtaggagtacatataaccgcctttacgccagtcggccacagcagaaagggtgaatcctttgtagctcacgcgggtgttgaaacccatattgaagtcgggagcggacgaaccgatcgtcttcatttcgctgttgctggtagtcgggataccgttggcgtcgacaatcactttgccgtagtaagggctgttctcgtcctgtacggtagcgagggcgggcacttggaagattccgagcggttcgccgactttggcaacgaagttggcgctgtaagccgttttcaatacgtattcggtcacaggcttgtccccctcgttccacaacttgttcaccttgctccagttcttgctgaaggtgactcccaagtcccattccacctctttggtgcggatcggagtcaggttgagggcgatttcgatacctttgttggaaatttcgccaacgttgcgcacggcactggtgtagcgtgtttccggggcgacgtctgccgcgatgatctggttcttggtcagcttgtcgtagtaggcgaagtcaatgccgatgcggttgctgaggaaattggcggtcaagcccaattcccattcggaagtcttctccggtttcaggttgttgttgggctggcggttgtattcggtcagtcccagcgccccgttcaacggagtgtccagatagccgtagccggatgaaatatgatcggggatgtagtatgccagcgttctgtacacgtcggcgtcgttacccgtctgtccccatgcggcgcgcactttcaggaagtctatcacgttgtttttcagcgaggggaacatatcggtcaggatgacggacgtgttgattcctccgtagaagaaactgttgtggtggatgggcagtgtagacgaccagtcgttgcgtccggaaaggttgacaaaccagaaattcttatacccgaattccacctgtgcgaaggctccgattgttctgcgcaaatcgctgtaattggtgctgacgggcttgtcggtcccgttctgcagattgtaccatccttccatgaacagcccttcgagaaacgacttcagataagacgatttccgttggttgaggttccatcctgccgtacctccgagagtgatgtctgtgccgatattgtagttggcgctcaggaagagggttgcgtcgatctggtcgtaattatcggtacgttcggtataagtacccttttcttcggatttgcctccgatgctgctgtaggaattgtcggcgtacgtcagtttcgccgtgcgcagcttctggcgggcgttggtgaagtcacctccgagacgtcctacggccttcagaccgggaatgacctcgtaagacaattccagtttaccgtagatgcggtcgtcctgatagttgttcttattgttggcgagtacccagtaagggttctgcgcgtaccacgtgtaatagttgtctccgttgaaccgttcgtcgttgaaatccttcatgacagaatagtcgatgtccaccgggtgctgtatcagttcctgctgcatggtggctcccgcgtttccttgtccggcggcggctttcgtcatgtctttgcggatatacgtgatgctggcgtcggcggcgaacttgccgaatttcatgttgccacggaacgacagggtgttacgttcgtatttgtcggcattgttgggcagcacgccgttagaggaggtgttgccgtaagaaagcatcaagcccatcttttcgttgccggtgcggacgctgatgttgttgttcatctcgaatccggtggtgtagaagttgcggagattgtctttcacgaacgagtagtgctttttcatcggggtagtcagtttgctggagccccattcgttgagtcggccgtccaatgccggtccccacgatccgttctcgcctctgttccacgttccccatccttgtccgaacttgtcctgttcctgcggcacgcggagcacgttggaagccatgaaagagccgtcgtacgaaacggtcagtttctcttgtttggcgcgtttggtggtgatcatcactacaccgttggcggcgcgcgagccgtagagggcggtggctgaggcgcctttcagcacggtgacggattccacgtcgtcggggttgatgtcgtttgccccgttaccgaagtcgatagcgtcgctggcggcaatgacaccgttgccctggtcgttggagaggctggtgttgttggacatcggcacgccgtcgatgacgtatagcggctggttgctggagaaagaggaataaccgcgcacgattactttctgtgagctaccggccgttccggagctggaaatgtttacaccggctatttttccggaaagtccggacatcacggaacctgacttggctgcgaccaaatcgtcatttttcactgtagaagcggcataacctagtattttctcgcttcttttgatacctaaggcggtaacgaccacctcgtccagcgccttcgcgtccgaacgcagcacgatttttaaaatcccttccttgattgtcacttcctgggggagcattcccacataagaaacacgtaaggttttggaggagcttggtacgttgctgattgtaaatttaccgtcaatatcggtgattgtaccaagagtggtgccattgactaatactgaagcacctacgacaggctgtccatcttcttcggatgttaccaatccggtcactttggatgtctgcgctgtcgccagacctatgcctataaataggaaggtcatgaagaacatcaattttcttttcataaattctctcttaattttaacctaaaaacacatcatttctctctaacaggctgcaaagataatataaattataataaactaagaaaagtaatgcgtttttaactaaatactgtcatattgaaagtggattccggtattgacatgggattttgaaatgtcatatggattgtttgcttgcttttagattattcggtgtgtcataaggaaagtgttgtaagtgtttattttgataataaaatatcattgattccgctaaatgggtgactttttattatttcagcttcttcccctcaccattttctgtagcattccgttgtaagtgctttcaaattcggccgggtgattgagtgcccaaaggatgtaatctcccggttcgttctttttgagcagggtagggcggtatccgggactgaggattttccatagcgtgccgttgattcctcccagttcttttcgtcgggcaagggcgaaaatggctttggcggtctgttcgttccggatgccgatagcttccatatttagtcgtagtatagcttcgaagtcccctccggacgaatcctctaaagacaaaccccttacagcaacaggcgaagcctgagaaacgccgtttggcggaacgggcggcttctcgttctcctttctcattttcccttccctctctgtctctttgtctttttgggtttccgatttgctttcattttccctctccatttcctgtttacttttaatatctgtatccgtttcttgttttgtttgtggcattgttgctgcggatttgcccgaacttgctgcaaatttgttcgaacttactgcgaatttgcccggatttgctgcggattcattcgtctgttctccgttttccccctttgtctcctttgtctcttttctctcctttgtttcctttgtctcctcctcgttatcattcgcttctttctcctccttgatcatccagaagttttccaaaggcaatttgtatttcctccggctgtcgatgatgattttgtgatactgctcttggatggcttgcgaggtcagcaccccgtactccttatatatataggtgtcgaacaatcccaccgacagacaatcgtcgatgatggcctgcatttcctcctcctcgcaacaggcttcctgagcgatgtcgaacagtgtgtccttgttccaaaggacataatagcctttttctttgtaaataagacaaagcagggaagtgagcgcggcaattcctgccgcgtgatggcggcaggagatgcggcgcactttccggtcttgcaggaaattgacatctagggggaaataatctaatccgggtttggaaatgcgtgccatgataaattaagttttaaaaagtgatacattgtgcggtttatcggaactcgttgcgtacgtcgaagcaggggcacatcttgataaactcgttgggcgagataatgccgtcaccgttgcggtcggggctggtgtcccggtggcctatcacttgtctgatgtcggggtaaacgagccgcaggtcttccaccaggcggatgagcgcttcgcgttgggcttccgtccgggtgtcggcgggacggccttccttgtccagcccgcccacgtagcagatacctatgcttcggcggttccagcccgtgcaatgcgctccgtcgagggagacatcccttcccggttcgatggttccgtcgagccggattacgaaatgatagccgatggaacggaaaccgcgcgcacggtgccagcggtcgatgtcggcggctgtgaaatcctgtcccgcacgggtggcggaacagtggatgataatcgtgtctctcattacagcgtccccctttcttgttggttgcggcttgtgtagatggcgaatccgaaagcgatggcttcgtcttccgacagttggcggtaatattgccggttcaccggatgctggaccgggatgcagggggattgtacaggcgggacaggccgatgatgggacgactgcggaacagcctgagcgggagaagtctgcggaacagcctgagcgggagacaacggtaagggttctttcatgataaaagcgtctcctctgtgctggcggacgcgtaagttgtggaggagtagtcgttccggatagcgcaactgtagtctgagccagtttatgaatgcgggattcatgtgttctcctttgctcatcgcctgcatggacgggtaggcgcggagtgtatttccacttgcgtccgttacggcgcagggaacacccgaatactttgaacccgtttttccgggaggccgcaatcccattcggatggcgtgcattatgttgtcatgtgcgtcacaccattcgaggttcgacacgtggttgttcagcgtgtttccgtcgaggtggtttacttgcggcagatgtttcgggttgggaatgaacgccttagctaccagacgatgcgtgtagtatttggtgtagattcctttttgcatgagctctgtctgctcgtagccttctcctgcgatcgtggtgcagagaatcagtttcgacttgcctttaaaactcaacacccgtccatggtccgagaccatgtagtcgggattttcttcgataaatctccaattttccatacttgatattggtaaacgttaataaaattatattctgttaaaaaacggtctgttcttttgtctccgcgtggagaaacggcgtttcctgcattccaagaacggcgtttcccggtgtatagaaacggcgtggactggatatgttaaacggcgtttcttcctcctccgtgcggggttcgagcctttcggcgcaatggataagaaactccaattcttcccggcagccttgaatggcttcttgcagggagtctacattgtactgcctgcaaaggatttcccattcttctcgttcctgccggttcattctgttctcgtcttttcgggttcatcctcagcgtcgatgtccagaaagttttccgcatggaacgtgcgccatccttttgcctcgatgtcgtagtagacgacgaacgtgttttccggtcgtggaatataaggttggtggaaactgtgttcgtatccggtgagtgtgccgatggcgtggcggacgctgccgtcttgtctggtgtagtggaagcggacatttccgtgatgcatctgccggatgagggcgcctatccggtgggcggtgacgagtgcgtcgtgccggttcataccattgttttgccggatggcggctgcctgtttcatgagccgcacccgttgaaaagaatgctcttctttaatcttggtcattgttcttcggtttattttgattatgaggcaaaagtagggaatggaaaggggaaagattgtccgagcttgacacataaatgaggaattaaagaagaatgtgtcaagcgtgaacatgaatgttaagagaaatagccgttctttgtggaaatttttaattaatacaataggaaaatggcaaagaaattggtaaaaagagggtcggaagtgacaagtaatagtgatgcaatctgtaaggtaaccggacttcggcattgcgatgatagcacaaaaaaagagattgtggactatttggtgaaaatagataagcagaatgatataccggaatgttatattgtaaataattcaaatagttcgacttcttcggtgagacgtgtgttcagttgcgtctgggatggcagtacttcaatacccgattttacgacgttatttaatattagcgcgtgtgtcctcaaaaaggctaaaatcgttgtagcccttcccggattactgtgtgcggttgtatgccttttactgaaagattcggcgaaagtgaagtgccgggttataaaccggcaccatctggtaatggatatcgaactctttgaggataaaattatatctgttgaagattgggaggagatgaagaaggaagaggcggaaaagaataaaacagataagaataaaacagataggaaaaaaacaaataagaaaaagtgaatcaaggttctcctaaaaaacggaaaaacaaccctacttgtgccggagtaagcaggatggatttctcgctgtatcccgtttgggcgagtgcagcctgcaattctgtatttttggctatccacccccgcagggtgcggcgtgctgaggcggtttgtatatcgggcaggtagaaggacgctaactggcttttgctataagtccggatgcggatggaaggggatgtttctgctttcattgtcggttgtcttttaaggggtttatcagattctatgtttgtaaaggtaaggctttttaggctgattggtgatgtgttgtgcagaagcggttgtgggcatggtttgtgcggactcgtgccgggttgctgtctcttgtgacaggtcggtacgttatggttcacgtttttttcccttccggttacctttgctttcgtaatcggttacagagaggaatttaatttatcaatcattaaaaaaaaggaaacagtatgccattaatttacaaaccttatcaggcaacgcttgccaacaaggaaggacagaaattgtattatccccgtctggtgaaattcgggaaggcagtcaatacgcagaaaatggcggaattgattgcggaaaaagcctcgctgacggcgggtgatgtccataatgtgattcgtaatctgatgtccgtgatgcgggaacagttgcttaatagccgcacggtacgcctcgaaggcttgggaacgtttaccatgatcgctaaggcgaacgggaaaggggtggagcttgaaagtaaagtcagcagcgcgcagattacttcgttgcgttgtcagtttacaccggagtatacacgtgaggcgaacggaagcgctacccgtgcgctgacttccggagtggaatttgtacacgtcaaggatgtggcgggctcgtttgtcgctgccgatgattcaggtgaagatccggacgacggaaagaaaccggatggcggaaacggtagcggagaagctccggatccgtctgaataatgagaaacggactttaagagactggattttaagactggattttaagagaggattttaagagaccggatttaaaaaaaaaattaaaaatagaagcttatgaaattgttgttggaaaaattgcttgacattcttgaggcaatattgcgtttccgcagacgccgtaaagagtagattgctgtttgtggaaattgtggaaaaatgaagctggctcgcttattatttgtaagtgaagagatgaaaaatcccccttactattaccttagtccgttgtgatattaaggaatggtaaggggggatttttttgtggggaaatcagatcagtcggtctcgatctggaacttacggcttactttcattagattgatggtgtaagtcaccacgttttgggcttcctgaaccatcgtcaggtataccatgctgacgcggatacttcccgactggctttggatgcgctgcagttccttgcgtttcagcagcgagagttgtccgttaaggtcgttggcgcggcggatttcttcttccatgttattgtaatcgttgttttccagttttctgcgacattgctggatcaggtaagtgatgtcttcggccgcgtcgctgaattcgcctttttggatagcgtccaatgggttgaagttgttgtcgatgtgctccaggcacggttcgcagagacgggaaatgctgtacaccagttcgctggcgaagtcgttgccctggtagtagtaaagccctttttcgagcacggtgttgttgtcgagacggcacatagcgacggttccggtacgcttcatctgcttgacgagctgcttctcgaatttggtggagcccatcgcgcgacgcaatccccgcaggttctcgtggaggaaggaggtgacggtgagttcgaaattcgtttccgcgtattccaacactttgccgagctcttcgcgggtgtgcttgcgcatcagttgcagagcttcttcgctgtcggtggtctgcatcagttgtttcagggtctcgttgccttgctctttcgctttgcgtttcttgtacatcacttggctgcgtatcaggatgaacacggcgatgccgatgaggacgatgatggaaatgtttcctccgtagtgaagtacgagggcgacgaagaagcagaaggtgaaggcggctccggcggtgatgaaccagccgccgatgacgctcagtacgcctgtgatgcggtaaacggcggagtcacgtccccaggcacggtcggccagtgaggttcccatagctaccatgaaggtgacgtaggtggtggaaaggggaagtttcagtgatgttcccaaagcgatgagcaggcctgccagcacgaggttgacggaggcgcggacaaggtcgaacgctgcgccgtcggctatgatggcttcgtctttgcggaagcgggtgtcgagccatttcttggtgctgttcggagtgattcgtgagattccgttggcgagcgccatgctgaaacggacgattgtacgggctatcggggtgcttccgaaggtttcttcgccttcgtcttggcgggagaggtcgacggaggtcttgataacggcgtgcgcctttttggaggtgcagagtgcgtagaccatgattgctccggctccgatcaggaagtaccacggagttttggcgggtcctagcagggaggtcatcaggaagttgtccgggttgcccgatccgttggcggtgtagtctatgaaggaggagaaaccggcgaggggaacaccgatgaagttgacgaggtcgttgccggcgaaagcgagggcgagggcgaaggtgcccatcagcacgactactttgaagacgttgactttcagccagtggaggacttgcatcagcagggtgaagaatacgaagaacacggtgatgagcagcagggtgttgtcctgtatccagtgtttgttttcgggtgtcatgaaggagctgtctttcagtcctttgatgagcatgaagtagatgatggaggtggcggcgatgcctccgaagagggctatgctgtacttcatctttttagtgtagttgaaggtgaatatcacacgggcaatccactgcacaagcattccgaagaagaaggcgatggctacggatacgaagattgccatgatgacggaaagggctttgtcggtgttgatgaggtcgcccagcgcgagggtgtcgctgttgtgcactttgatgagcgcgagggcgaaggttcctccaagtagctcgaagactagtgaaacggtggtggaggtgggcatgcccattgagttgaagacgtcgagaagcactacgtcggtcagcatgacggcaagcaggatgcacatgatttcggcaaagtagaagtgctcgggctggtagatgccgtgacgggctatgtccatcatcccgttggacagggaggcgccgatgaaaatgccgacaccggctatgaacaggatggtcttgaacgatgcggctttggcgcctaccgcggagttcaggaagttgaccgcgtcattgctcacgccgacgatgaggtcgaacacggcgaggacgaacagaaaaatgataatgcataagtaaattgtctccataaatgtatgtatgtaatttcggcggcaaaggacggaatttgacgttgcagggaaatgtcatagatgttacatttgtgttacaatcttctttcttttgtcttgcaacaaaagaaagaagcaaagaaaaattcaagtaggccggttggtctttggggacggttattgggacatggctggctggtctttgggttgctgggtgttatttgaacaaagccggttatatagtgtgtattgcgctcggatggcgggggttccgggcgttctttttttgaatatgttttgtagctttgcgtctactcggcaggctttttggttgtcggcgagttggatggtaagcatttcgatcaggctgttgcgcaggtcggggtcgaggacgggggtgatggcctcgatgcggcggtagaggttgcggcgcatccagtcgggtgagcccatgaagactttgggattgccgccgttgccgaagtaccagatgcgggcgtgttccaggaagctgtctacgatgcgggtgatgcggatgttgcggctgtacggctggtcggggatgaggcagcagattccgcgaatgataaggtctgtctgcacaccgtgttcggaggcttcgtagaggcggtctatcatggcggggtcttgaagggcgttcatttttaggatgatgcgggcgggtttgccttgatcggctagggcaatctcacggtcgatgaggcggttcaactctgggatgaggttgaaacgggcgacaaggagggtggtgaacttcggatcttctttgccttgaagggtgcggaagaggttgtaaaggtcgttcactatttctttgcgacaggtgaatagtccgcagtcggcataaagtgtggcggttttctcgttgaagttgccggtgctgatgtaggcgtagctggggattttctcaccgttcagtccacgacggcggataagggctaccttggcgtgcaccttcagaccgggaatgctgtatatgatttttataccggcggcttgcatcatttcggccgtggccaggttgttctcttcgtcgaaacgagctttcaactctacaaatactgtgactttcttgccgttctgggcggcggctatcagggtgttgatgacggcggagttctccgccacacggtattgcgtcaccatgatttcacgggtttccggattgtgcacggcttcgtaaaggaagtggatgaagtgctcgaaggagtgataggggtaatagagcagcaggtctttccgggcgacgtagttgaagatggattctttttcgtcgaggatggtgagtttcatcggcttcggcttttcggggctgtggagtgacttgctggggttggggagatggcgcaggtcttccaggttcaggtgtttgtcgccgggaacgagctcgtcgcggtgaatgtgaaacgcgtctacgagaaaatccagaaagtcgtgcggcatggcacggtcgtagacgaagcggcagacgtctcctattttacgcttctttactttcttcttgagctgggccacaaggtcggcactgctggcggtgtcgtcaattaatatgtcggcgtcacgggagatttttatactgtaacacgactcgacatcataaccgggaaaaattagatcgaggttcgccttgatgatgtcttcgacaaacatcaggtaatgatttttttcatgacacggcaactcgatgaaacgggggacttttgcgtagggctgcttcatcacgaagtaaagaggaggacgggaggactcgaggatgggggattcttttctttcttctttcggatagagtcggatagcgagatagagtcggttatctcgtaagaaagagacgattttgtctttggaaacgggtacgggttgcaggtaggggaagatttcttctttgaagaagtctttgataaactgctgatggaacggctctacatggctgtcctgataaaagatgatgtggttcttttgtagggcaggcaatattttttgttcgtagatgcgcacacggtcatctagttgccggttgacttccctgttgatttcctctacaagttcgcgggcggattgtacgctttcttcatcactttccgttgcgccggaagcaacagctttgtggtctgctacacggattttataaaattcttcgaggttggaagagtagatggaaataaagttgatgcgttcgtaaagggggagacgctcgtccaaagcctccagcaacacgcggtagttgaacgatagccaactgatatctcgcttgaaatatttatatttgttttccatatgctttaagatttttccaaatatagtatctttgtaggattaaacaaagaaatttatgataagaattggattattatccgatacccatgcttattgggatgagaaatacctggagtattttgagccgtgcgatgagatttggcatgccggtgatatcggttcggtggaagtggcggagaggttggcggcgttccgtcctttccgggcagtctacggaaatattgacgggcaggctatcaggaagctgtatccgcaggtgaaccgttttacggtggatgacaccgaagtgctgataaaacacataggcggctatccgggaaagtatgatccttcgataattggaagtctgatgacacgcccgcccaagttgttcattagcgggcattctcatatattaaaggtgaagtacgacaagacgttggatatgttgcacatcaatcccggagctgcggggatgtcaggatttcataaagtgcgtacattggtgcgctttgtcatcgagcgggggacgtttaaggacttggaagttatcgagttggcagataaataatttttcatattatttttgtcatctcggatttctttccgacctttgcacccagtttatgaataatgaagacgaacatgaagggaattattcttgccggtggcagtgccactcgcctctatccgctttctaaagcgatctccaaacagataatgcctgtctacgacaagccgatgatttactatcccctgtctacactgatgctggcgggaattcgtgagattttgatcatctcaactccgcgtgacttgccgatgttccgcgatttgctgggaacgggtgaagaattgggtatgtctttctcttacaaagtgcaggagcagcctaacgggttggcgcaggctttcgtgttgggagccgatttcctgaatggagaaccgggctgcctgattcttggagataatatgttttacgggcaaggtttctccgccatgcttcgccgggctgccaatatagagaagggagcttgtatattcggctattatgtgaaagaccctcgcgcgtacggcgtggtggaatttgacgaacagggaaaggttatttcgctggaagagaaaccggcagtgccgaaaagcaattacgccgttcccggattgtatttctatgatgccaccgtgacggaaaaagcggcggctcttcggccctcagcacgtggagaatacgaaataacagacctcaaccgcctgtatctggaagaaggcactttgaaagtggaacttttcggacgcggattcgcgtggttggatacgggaaactgtgacagtctgctggaggcttccaactttgttgccaccatccaaaaccgacaaggtttctatgtcagttgtattgaagagatagcctggcgtcagggatggattctgaccgaacaactgctgctgctgggacaacgcctcgaaaagaccgagtacggcaaatatttgatagaactggcgaaacaatcctaaaatcaacataaaaagtaaaatatgaaaacttatctagtgacaggtgccgcaggttttatcggtgcaaattacatcaaatacatcttagcgaagcatagcgatataaaagtcgtgatattggatgcattgacgtatgcaggtaacttagggacaattgcgaaagacattgacaatgaacgttgcgtctttatcaaaggtgatatcgggagccgcgatgtggtagacagcctatttgctgaatatcgctttgattatgtagtgaatttcgctgccgaaagtcatgttgaccgtagtattgagaatccgcaactgttcctgataaccaatattttaggaacacagaacttgttggattgcgcacgtcgcgcatgggtgatgggcaaggatgaacaaggataccccacttggagaaaaggagtgcgttatcatcaagtgtctaccgacgaggtgtatggctcgctgggagccgaagggtattttacggagacaactccgctctgccctcatagcccgtacagcgcatccaagacaagtgcggatctgtttgtgatggcttatcacgacacttataaaatgccggtaacgattacccgttgctccaacaattacggtccgtatcatttcccggaaaaactgattccgttgattatcaagaatatacttgaaggaaaacatctgcctgtctatggcgatggaagtaatgtgcgcgactggctttatgtggaagaccactgtaaagctatcgaccttgttgtgcgtgaaggacaagaaggcgaggtgtacaacgtgggtgggcataacgagaagacaaacctcgaaatcgtgaagctgacaatctctactattcatcggttgatgacggaacatccggaatatcgccaggtgctcaagaaacgggtgaaagatgagaacggggagatttccatcgattggatcaacgaagaactgataaccttcgtcaaagaccgtctgggtcacgaccaacgttacgccattgaccctacaaagataacaaatgcactgggctggtatcccgaaacgaaatttgaagtcggcatcgtgaaaaccatcgagtggtatctgaacaaccaagcttgggtggaagaagtgaccagcggagattatcagggatattacgaaaagatgtacggaaagtagattaaaaaaaagtgattaaatggggaatgatctcgttttcaaagaatcatcccgatagctaaaagaattcccataaacagcatattacgcgaggtctcgcctaatatgctgtttaattttttaccgctgtgtatttttaccattcgcctccaggtgaggacgtggggaaccaggtaaaactgtggaagaagggcagcgtaaatatgtccttcgcgtaagaaatataggcagagtagggaagccgaaatgcctagcagcagatagaaatagcgtccgaacttctcaccgaaacggacgatgacggtccgttttccgctacgggcatccgcttcgcggtctcgataattattgacaactaacagcgtgtcgattagtagtccgcaaatgaaggaggcaatggtgacatccggtgtccacgtcagtgcctgcacgtagtaagttccgcctacgggaacaaatccgaagaaaatgatgactaacacgtctccccaaccgttgtaggagaggggataaggtccggtagtgtaaaggaaggcgaataatacacaaagcgctcctatgatgatcaactcccatccggcaaaaagtaatagcgtgcagccaatcaggcaggcaagtgtgacggtaacggcaattccggttttcattgcctgcggtgagatccatccttgtgcgcaagcacgttcgggacccaaccggtcttcacggtcggttcctttgaggaagtcgaaaagatcgttgatgaaattcgcggctatttgcatcagaccggcaaacaggcagcagacaagggcaggcaaccaatggaaacgtccgtccattgccgctagggctgtaccgattaaaaccggagtgatagctcctgtgagagtcttagggcgtgcggctaatagccatgctttcagtgaattacgctttacttcttccatgctttaatattttataaagagttttgacggacaaagatacatgatttttcgtatctttgcgcccttaaaaacttcaaactaagagaagatgaagaaatctatttatccgtttctactgctgacgctgcttttacttgtttcctgcaagtcgaaaaagaggatggtagcaaccttgccgcgtcttgttttaaacacagactccattgttgcggatacgtccaacgtcatagccggactgtttgctccggatcactcgcaactcaaagatctgaacgtttcgaaaggcaggaaacgcagggccaagaaaaataaatcttctgctgatgcatataaatcggaggactgggtacttcgcggtacgaaaataacttcttccgaagtggacgtttcctccgtctattcaggggtggatcgtgtcgtgaaatatgactttacccaccgggacgttcccgaagccttcgagggttttcgcatcgcttttatctccgatttgcattataagagtttgttgaaagagaaagggctgaatgatttggttcgtctgctgattgcccagaaagcggatgtactcttgatgggcggcgattatcaggaaggttgtgagtatgtagatcctttgttttcggcgcttgcacgggtgaagacaccgatggggacctacggggtgatggggaataacgattacgagcgttgtcatgacgagattatccgcacgatgaagcattatggaatgcacccgttggaacacgaagtggacacactccgcaaggacggtcagcaaattatcattgccggtgtgcgcaatccttttgacttggggcagaacggaaagtcccccacgttagccctttctcccagagatttcgttatcatgctggtgcatactccggactacgtggaagatgtttctgtagtcaatacagatctcgctttggcagggcatacgcatggcggacaagtatgtgtgttcgggattgctccggtgttgaactcgaattacggcacacgtttcctcaccggactggcttgtaattcggctaaaattcctttgattgtaaccaacgggatcggaacctcccaattaccaattcgtatcggtgctccggcggaggttataatgattactctgcatcggttgaaggagtaagtacactttctatttgctcccacaccttcggatgcaggaaataccggacatcctttcccgccttcagcgcctcacgaatgaatgtggagctgatttcaaacactggagaatggacgaggcggacagtttccggcaattcttccgccgctacgggaaagccgggacgggggtaaataatgatgtggttctctttaatgatgcgctccggctgaaaccagcggtcgaaacgcgcccaattgtccgaaccgatgatgaagtgaaactcacggtcgggataggcttcgcgcagtttttcgagcgtatatacactgtaagaaggacggggaagatgaaattcaaaatccgaagcacggaaatgggggtaatcgctgatacacagttctacaagccggagacgcagttcgtcactccatagctcatcctgcgttttcagagggttttgaggagtgaccatgaaccagatttcatccaagccttcgtactcgcaaaggtaattggccaatgcgaggtgtccgatatgaatcgggttgaaagacccgctgaatattccggttttcagtcgatggctttttttcattggttgcttccttccttgttataagctactttttccattggattggtaactggtaactcccttttccaactttagtttatttctccagaaactccttaatcactttcagcgtttcggctttggccgtttctaggttatcattcatgatgatgcagtcaaattgcggagcgaagctcaattcatattccgctttggcgatgcggctttctatcacttcgggagtgtctgtgcctcgtccttccaaccggcaacgcaattcctccaccgaaggcggctggataaatactgacaacgcacgctcaccgtaaaatttcttgatattgcatccgcctaccacatcaacgtcgaacacgacattctgtccggcttccaattgcttttccacctgctctttcagcgtcccatagtaacggtctttatacacttcctcgtattctagaaattcgttgttctcgatgcggctacgaaactcttccggagtaaggaagaaatattccaccccatgctgttccgttccgcgtggaggacggctggtggcggagatagaaaacgcaagattcaaattctgcgtcagcagataattgatgattgtagatttccccgaacccgacggagcggagaatataattaatttgccagtcatagttaaattaagaatgaagaattaagaatgaaggatgaaggatgagagacgttcgtctacatcacgttcagtacctgttctttaatctgttccagttcatctttcatctgaaccacgattttctgcatttcggcatgattggacttgctgcccagcgtattgatttcacgtcccatttcctgagcgataaatcccaatttcttgccttgtccgttgccgctttccagcgtactgataaaatatttcagatggttgctgaggcgttgtttctcctcgttgacatccagtttttcgatatagtaaatcaactcctgctccagacggtttttgtcgtagtccacgctcagcgtcttttcgagagcgtctgtgatacgttctttcaccttttccacacgttctttctcgtaaggagtaatcttttcgagcaggcttgtgatgttggcaatcttctcgcggaacttcttttccagtgcagccccctcctgtttgcggaaatccaccagatgcccgatcgcttccgctacagcagcgtgcaccgctttccattcttcctccgtaagttcctgaatttcagtcttcgtcatcacgtccggcatgcggagcaatgtctgaaaccagtcggcaggaagaggaatattaagattttccgagatggccaaaatctgtttgtagtagccctccacaagagcctgattgataggagtagcgctttccgccccctctttcttctcgatccacaggctgaaatccaccttgccgcgttccagcactttggaaatctcgttacggatttcgatctctttttcacgataagccggagcgatgcgagtggaaagatccatagccttgctgttgagcgacttaatttctacatttatttttttatcagggagttcggctgtagctttgccgtaacctgtcatcgattgtatcataaatcttaaagttttgtgcaaatttacacgattattttaagaattggaaattatcatgtaaatttgcgacaatttaataagctgatttttatgtcgtgtatactgaatattgaaacctccacctccgtttgctcggtggcaatcagtgaggacggaatggttccgtttgtggaagaagacctgaaaggcccttcacacgccgtttctttaggagtttttgtcgatgaggcattgtcatttatcgacagtcatgctatcccgttggatgcggttgcggtcagttgcgggccgggatcttacaccggactccggatcggggtttcgatggcgaagggaatctgttacggacgcaacattccgttgatcgggattccgacgcttgaggtgctgtgtgttccggtcttgctgcatgagaatcttcccgaagacgctttgctctgtcctatgatcgacgcccgacgtatggaagtttatgcagccgtttacgaccgtgccttagatgtgaagcgtgccgttgcagccgatatagtggacgaaaattcctatctggagttcctgaacgaacgcccggtttatttcttcggtaacggggctgccaaatgccgcgagaagataacgcatcccaacgcgcattttatcgacaaggtgcatccgttagccaaaatgatgttcccgcttgcagagaaggcaatagcgaaagaggactataaggacgtggcctacttcgaacctttctacctgaaggaattcgttgcgtccacaccgaagaaactcctttgatgaattggtgatgagcaattagcagtaacttgattagcaataaacaattaataatggacgaaagtgattttcaactttcaactttttaagattatgcaatataatacccaacagaaaaaaatgccgcttcccgaatacgggcgcagcatacaaaatatggttgactatgcgttgactatacaagaccgtgcggaacgtcagcgttgtgccaacacgattataaatatcatgggcaatatgttccctcatttgcgtgacgtgcccgatttcaagcataaactttgggatcatttggccattatgtccggttttgagctggacatcgattacccttacgagattatccgcaaagacaatctggtgacccgtccggaacacataccttactctactgcccgtatgcgttaccgtcattacggtcacactttggagatactgatcaagaaagccatcgaatttcccgaaggaaatgaaaagaggaacttgatagccttgatctgcaaccacatgaagaaggattacatggcgtggaacaaagacacggtggacgaccggaagatagccgaagacctttatgaactgtccgacggcaaactccagatgaccgatgacatcatccgcctgatggccgagcgtttgagccagaactaccgcccgaagatgaactacaataacaatcgtcagaataacaagagacgatattaaaaaatttaataccccgaacatcaatggcttcatttgtaatcgaaggaggacaccggctctgcggcgagattcatccgcaaggtgccaaaaacgaagttttgcagatcatctgcgctacgttgctgactgaagaggaagtgacggtgaacaatatacctgacattttggatgtcaacaacttgattcagctcttgcgtgagatgggagtgacggttgcaaagaaaggcattgatacttatagctttaaggccgaaaatgtagatttggcttatctcgaaagcgatgagtttctgaagaaatgttccagcctgcgggggtccgtcatgctgataggtccgatggttgcccgtttcggcaaagcgctgatctccaaaccgggaggggacaagattggtcgccgtcgtctggatacccactttgtcggcattcagaatttaggggcagacttccgctacgatgaggagcgtggaatctacgagattaccgccaaacaacttcggggcaattatatgttgctggacgaggcttccgtcaccggaacagccaatatcgtgatggctgccgtgcttgccaaaggcactaccactatttataatgcagcctgcgagccttacgttcagcagctttgccgcttgctcaaccggatgggagcgaagattagcggtatcgcgtccaacctgcttaccatcgaaggggtggacagactgcatggcacacagcacaccgtactgcccgatatgattgaggttggcagctttatcggtatggcagccatgacgaaaagtgaaatcaccattaagaatgtttcttacgagaatctgggaatcatccccgagagcttccgccgtctgggcatcaagctcgaacagagaggcgatgatatttacgttcccgcacaggaaacatacgagatagaatcttttatcgacggctccatcatgacgatagccgacgccacctggccggggctcactccggacttgctgagtgtcatgctcgttgtggcgacacaagccaaaggcagcgtgctgattcatcagaaaatgtttgaaagccgcctgttcttcgtagacaagctgattgatatgggagcgcagattattctctgcgaccctcaccgtgccgtagtcatcggccacaaccacggcttcaagctgcgcggcgcccgcctgatttcaccggatatacgtgccggtatcgccctgctgattgccgccatgagtgccgaaggaaccagtaccattagtaacatcgaacagatagaccgtggttatcagaacatcgaaggacgtctgaacgccatcggagccagaatcacccggatatgataaagaaagaagaagtatataagataggattgttcaataagccgcacggaattcacggtgagttgcagtttacctttacggatgatatttttgaccgtgtggactgcgactatctggtctgcctgctcgacggaatttttgtaccctttttcatcgaagagtaccgtttccgttccgactccaccgctttggtgaagctggagggggtcgataccgccgaacgtgcccgggcgtttaccaatgtcgaagtctacttccctgtgaagtatgcggaagaagtcggagacggtgaattgtcctggaactttttcgtcggtttccgcatggaggacactcgtcacggacttttgggtgaggtggcggaggtggataccgctaccgtcaacacccttttcgtagtcgagaaagacggtgaggaactgctggttcccgcccaagaggaatttatcgtaggcatagaccagagacggaaactcatcaccgtagagcttcccgaagggttgctcaatttggaagatttggacgcggatgatacggattgtcccgtataatccgtatctgaagaggaacataaatcggtcctcctttttaatttttaatctttaaatttttaattgttcaaatgccaaagagaagacgaagcaaagctttctggaaaaatttcaagttcaagtataaactgacgattgtcaatgaaaacacgcttgaagagattgtcgggcttcgtgtgtccaaactcaatggcctttccgtgttactcagcgtactgacggtgttgtttctgatcgcagcctgcatcatcgctttcacccctttgcgcaactaccttccgggttatatgaacagtgaggtccgttcccaaatcgtgggtaacgccttgcgggtggactctctgcaacaggtgctcaaccggcagaacctctatattatgaacattcaggacatttttagcggcaatatacccgtcgacagtgtgcagacgctcgactcgctgactaccgtccgcaaagacaccttgatggaacgcaccaagcgcgaagaggaattccgccgtcaatacgaagaaacagagaaatacaacctgacttccatcacctcccaaccggatgtgacgggacttatcctgtaccgcccgacgcggggaatggtttccgatcgcttcgatgcgaaaaagaaacactacggaacggatattgccgccaatcccaatgaaagtgtgctggcaacgatggacggaaccgttattctgagtacctacaccgccgaaacaggctacctgatcggtgtgcaacatagtcaggatttgatatcggtttataagcattgcggctctctgctcaagaaagagggtgaccgtgtgaaagggggcgaagccatcgctttggtgggcaacagtggaactttcagcacgggtccgcacctgcatttcgagctttggtacaaaggccatccggtgaatcctgagaagtatatcgttttttagtgaggagaatatataagaaatgaatatagaaactaataaaaagaagaaacaaatagccattttaggctctaccgggtctatcggcacacaggcattgcaggtgatagaggaacatcccgatctgtacgaggcatacgcgctgacggccaacaatcgcgtggagctgctgatagctcaggcgcggaagtttcagccggaagttgtcgtgatagccaacgaagagaaatataccgaactgaaagaagctttgagcgacctgcctataaaggtatacgcgggaactgacgccatctgccagatagtggaggccgggccgattgatatggtattgacggcgatggtcggctacgccggactgaaacctaccatgaatgcgattcgtgcaaagaaagccattgcattggcgaataaggaaacgttggtcgtggcgggagaactgattaatgaactggcacagcaataccgtacaccgattttgccggtggactccgaacattccgctgtttttcagtgtttggcaggagaagtcggcaatccgatagagaaagttatactgactgcttcggggggacctttccgtacctgcacgctggagcagcttaagtccgtgaccaagacgcaagccttgaaacaccccaactgggagatgggggccaagattaccatcgactccgcttctatgatgaacaaaggttttgaggttatcgaggcgaagtggttgtttggcgttcagcccagccagattgaagtcgtggtgcatccgcaatccgtgatccactctatggtgcagtttgaagacggggcggtgaaagcgcagctcggtatgcctgatatgcgtctgcctatccaatacgccttctcctatccggaccgtatcagtgcctctttcgacaggcttgatttctccaaatgcacgaacctgacgtttgaacagcccgacacgaaacggtttcgcaacctcgctctcgcttacgaagcgatgtatcggggagggaatatgccttgcatcgtcaatgcggccaacgaagtggtagtcgcttctttcctgaaagacggtatcagctttctcggcatgagtgatgtgatagagaagacgatggagcaggctacgtttatagccaaccccacgtatgatgactatgtagctaccgatgcggaagcgcggcgaatcgcttccggactggtgggtcggcaaagtctttagttcctccccccaaaaaactattcattcgtgtggatagtaaaaagtaaatagtaattcgtaaaatataaattgtaatataataaacatggaaacatttttgattcgtgccctccaattgattatgagcttgtctttgctcgttatcattcatgaaggcgggcatttcctttttgcccgtctgtttaaggtgcgtgtagaaaaattctgcttattcttcgacccctggttcactctgtttaagttcaaacccaagaaaagcgaaacggaatatgccgtaggctggctgccgttgggcggttatgtgaagattgccggtatgattgacgagtcgatggataccgaacagatgaagcagcctgagcaaccgtgggagtttcgttccaaacccgcttggcaacgcctgctcattatggttggcggggtgctgttcaacttcctgttggcgctgttcatctattcgatgattctttttgcatggggcgaccagtatataaaggtacaggaagctcctctcggcatggacttcaacgagaccgccaagtctgtcggcttcaaagacggtgacatactgctttctgccgatggtgttcctttcgagcgatacgacggtgatatgttgagtcagattgccgacgcccgcgaagtaagcgtactgcgcaacggtgcgaaagcctcagtctacattcccgaagactttatgcaacgcctcctggtggacagtgtccgttttgcctcctatcgttttccgtacgttgtagatagcgtcatggtcaactctcctgccgcgcaagcgggtattttgccgggcgatagtatcattgccctgaacggaacgcctatctctttctccgatttcaaggaaatgatggcggaacgtaagaaaaacgaggctgcgcttctcaatgacagtatcgacccgcgtttgatcaccctcacttatgtacgtggcggcgtggaggacacgctgagtatgcgtgtggattccgcttacctgatgggtgtgaccgcttgcgtgttgaccgaccgtttgttgccgatggtgaaaaaggagtatgctttcctcgaatctttccccgcaggtatctcgctcggtgtcaagacgttggaaggctatgtcggaaatatgaagtacctcttctctaaagaaggagccaagcaactgggtggcttcggaacgattggcagtattttccccgcaacgtgggattggcatcagttctggtacatgacagctttcctgtccattattctggctttcatgaatatactgcctattcccgcattggacggtggtcatgtgctcttcctcttctacgagatgatagcccgccgcaaaccgagcgacaagtttatggagtatgcccagatgaccggtatggtcctgctcttcggtcttcttatatgggcgaatttcaatgatattttgaggttcttcttctaaatctcttgaaggaaatcctgttttcatgaagttccgatttcagcaacttcatgaaactttataaaagtagaaagaccttccgattacagggaagcaagagcgtatttgtatagcaaatagcttataatcaacaaactaacatccccgttctcttaaatacaaaaagggcgttttaacactgtgttaaaacgccttttttgtattcaaggaaccgccttttctctctaccaagaaccgccctttctccatttcccttcccgccttgtcccgcaagaagccggactctatgttaaaatttaacggttcagcttcagaatcctttgattactgcttcctctgaactccagatagggagagaaaagcgactgctcaaaacgtccgtccaccagtacgtcgatataggttagtattgccttcaagcggggttgttcctgaatctcttcgtaagtataaccagtgtagcaccacacgttcatcccggtttcctccttcacccgcctgacgagcgacaggaatgcttccggattatagaacggatctccaccggagaatgtcaccccatccagcagcggattggctttaatctccttgataatgctttgaatcttctcctctgtcaaccgttcccccgcttccggattccagctttccggattgtggcagccgggacagtgatgagaacatccggcaaggtaaatagaataccggattccctcaccatctactatcgtctccggataggccgttaataagttgagagttgagagttgagagttgagagttttcataactggttgagataaagtgatttaagtaaaaaaataagagctaggagttaataagttgagagttgagagttgggagttaagaattaagagttgagagttaagagttaaaacatcatctcccttcactctcaactctcccttctcaactctcaacttctacaagtgctttacccggtccttttcttctgctcgtttggcagagttccacgagtttaaatcaccagtcagatagcctgtgatgcgacgcatacggaggatgctttcgctttggcaaaccgggcatttatcaaaaatcacccctttgtaaccgcagttgtggcacgtatccaccggatgattgatcgagccgtagccgattccctcgtcgtgcatcactttcacgattttggcgatggcgcgtacatttttctgtgcttcgccgtccagttctacatacgtgatatgtccaccgcgtgtgatggcgtggaaaggagcttcgcacttgattttctctacaatgctgatcggctcttttacatccacgtggaaagagttgacataataatcccggtccgttactccgggaatcttcccgtacttccgtctgtccattttggtgaaacgtccggagagtccttcggcgggagtagccagaacagagtaattcaagttgtatttcgctttgtattcgtctactaccttattcatttccatcaccgcttcgtacaacgtgtcccatgccttccggctgtgtccgtgcccttctccgtagagtgccaccatcgcgttgtgtccgccgatgaatccgattcccagcgttccgctgcgcaatacgtcgcccacctgctcgttcgggttcaagtccgcaccgcctttccatacattattccccatcatgaaagggaactggcgtgcaagagctgtacgttggtactgataacgttcgtaaagctggtctgccaccaaagcagccatagagtgcacggattcaatgaaaatctccttagctttctgttctatggcagccgtgttgcgttcgtcctctatcagattctccgccttgatgcgggcttcgatggcgagtctcggcatattgagcgtggtgaaagacagattgcctcgccccaatgatgacttttctcctgccacgttttcaaacacacgggtgcggcaacccatcgttgccaactcgtagatgtaccgtttcggatcatccgctttccatttctcgttcgtgttgaaaggcgtgtcgaggaacatgaagttcgggaacaacgcttttgcggttgtctggcaggctttcagcagcaagtcgaagttgggagcttcgtaacggtcgttcatggcctcttctatattctccgctttcatagccttttcaaaatccttttccgagtaagacaccccgtctttcactttgaaaatctgaatggggaaaacgggcacttcacctcgtgtgcccagtccctcgattgtggctttcagtaactcttcaatcaccatgcggccttcggcggaagtgtccgtgccgtagtttatcgagctgaataccacctggttacctccacgagagtgcatcgtgttcaggttgtggataaatccctccatcgcctgatgcgtgtccttgcgggtctgctgataagccttttccacaattcttgcgaggtgctccttgtctatgatgatctgcaaggctatcagagcgatgcgtaatgtctcgcgttcggtttcggtggacttgatggagggaagatattcctcgatcaacgtgcggatagtcttttcgtccgcctggcttccgttttccatcgccacgtagaagttgatgaacgaagccaagtgtttgcggaatgacttcgctactcctttcgccatgaagaaatcgaaggcggggattgcctgtcctccgtgttgctcgttctggttggtttggaaaatgatggttgccagcgtggcgtagctctgaatgctctgtggcgtgcggatacttccgttcttggtacggaatccgcgttcaaagaggtcgtccaagtcatactggatgcaggtcgtcgtctttgtcggatagtaatccaagtcgtggatgtggatgtcgcccagttggtgtgcttccgcaaaacgtttcggcaacaggtatttataggtataatctttggtcacttcggaggcgaaagtcatcatttgcccggcaggcgtgtggctgctcatgttggcgttgctcagattgacatcgttcttgtcgatggcgacgataccgtccatcacgtgcttcatctgggttttcttgtcccgttccgtgttccgccattcgcgatagataatgtacttcttcgctacttcagggcgcaccttcatcaatgctttttccaccaggtcctgaatctcctctacggtaatagtaggggtggcaaattggctgattacgttcatcgtgatgtcagccaccaactgctgttcatcttggataccggttgcattgaatgccttactgatcgcattcttgatcttactgatagagaaatcttctcttttaccatcacgtttgatgatacaaatttccgcgtagttcataactttaactcccgaaagtgattaataataagttgattctgattccggcaggtcttctgacttatccctcccccgcaacaccttcccacatccgttgccgatgcagtggcttaccgtgcggattcttagagaattacagcagcgggtactgtcgccgatttgcacagcgttccctcattgactaaacctctttttagttccgaaaccggatacaaagataggagataatccaatagcttggttcgcttttaacattaaattttgggaaacttttctttcttgctgatacagaaagttttccgttttgggaaacttttctttaagttattctttaaaagttgtgtgaaactctccgttgttcttcttgtctatattatgatgggttatttgttaattttcagatttaactgcgttgaatgttaacggatgtctgatatctataaaaccagccagatcgccacgatgtgtcctacgcttccgccgagacagaacagatggaaagcggcgtgcatataaggcttgcgcagcgaatagaatacagctcctgtaatgtatgaaatacctccgcctatcagccaccagaaagcgggggagacaccggccatttccaactgatcgagaagaggcttcattgccaccagtatacatgcccccatacccacataacaaaccgtttcgagattgctatgctctttcagctttttgaaactaaggatgaaaccggcaatggcggacagccagacaaatgtgaaaataccccatccccaaccgcctgcatggcgcaagacgagtagtgtgaacggagtataagtgcctgctatgtgcagataaatagctccgtggtcaaatttacggagctgttctttcagcgctcccggacgactaccgtgataccaggtagaactgacgtaagaagaaagcattcccgccagatagacaatcacgcagggcactgcccattgcggatcagcagcaacggaagcttttcgcagtaagaaatatcctgctacgattccgagaagaatgcctgccccatgactgagggtgttcgcccattcttcccggttgctatatcgtttgtttttcaatgtccctcgactaaacccgactaaaccaaatgtccgatccactcttcgcggtcgcccggaaggaggtcgattaccggaatttctaccattgtgtaacatcccggttgctgtttcatggaagcgcgtgccacgcacaccaatacctgtgcggtcagtgcagggttgttgatacgcatattgaattcgaacaactggttctgggttttgccggatacgcccttgcgggtcaggttcacgccgtgtcccatgtcgagcagggcgtctacgctcggaacgagtttcacgtgtgtttcatcgttcacaaagtaaggatctgccttgatggcagcagctacttcttcgaatttatatccgtctttcagttcgatgtataccatgcggcggtggattcccgttccggtcggaatagtcatggaaagggcagccttcactccgtcaatcgctttcacggctacggtgtgtcccatgctcatacccggaccgaagttcgtgtacgtgatacctttcggagcgattgcttccagcatggtgcgtacgatggagtcacttcccggatcccatccggcagagatgatcgatacggctttatgctctttggcggtagcgtttagtgtacggcgcaagtctacgatgccggtatggatatcgaaactgtccactgtattaatgcccatcgccaggtattctttggcatatttctctacgctgcgggtcggcgtgcaaagaatagctacgtctacctctcccagctcttttatgtccttcactactgcgtagtttgctaactcttccggtttgttctctgctccggcacggcgaacgactccggctatttcgaaatcaggtgctgcctgaagcgcttcaagtacataatgcccgatgttgccataaccaacgatggcagctcttacttttttcattcttttcttggttttaatgaacaaatttctttcttttgactacaaaagtaaacaaattactactaactttggttcgtcagctttaatattttattttttttcactagcaggcaataccggtccgcatgaaagcaaatcagggtgtgatgtgctgcatcgaaaaaactctgtggcccctgtgtcctctgtggtgaaattgttttatctttgtacccgttatgatagaatacattagaggcgagcttgccgaacttagtccggcaaccgcagtgatcgactgtaacggggtgggctatgccgccaatatatctctgaacacctattcggccattcagggaaagaaaacctgtaagttgtatatatatgaagccattcgtgaggacgcttatgtgctctacggatttgccgagaagcaggagagggagattttcctgttgctgatttccgtgtcgggcattggcgggaatacggcgcgtatgatcctctccgccctttcgcctgccgagctggtaaacgtcatcagtaccgagaatgcgaacttgttgaagacggtgaagggaatcgggctgaagactgcgcaacgagtgattgtcgacctgaaagataagataaagacaatgggagcgtccgctgccggtggaagtgccgttggcggtatgttgctgcaggctgccaacgcggaagtgcaagaggaagctgtggctgcattgacgatgcttggctttgctgctgcgccttcgcagaaggtggtgctggctatcttgaaggaagagccggaagctccggtggaaaaggttattaaactggctttgaaacgattataatgatgaagcaatcaaagatttatatgcgcccgtggcttgagattcatcaccggacgaagaaaacggatacggacgagtggtacatggggttggccaatgagctgttgccgttggtgatgactttccctttgtatgaaggaaacccggacgtagcggaagaccagcgccggttggctctgacgtgcgctttgtatctggaggactgcgtggcggatgcgggaaactggcgggaatttatccattggcataagaggagttatggtcgttatctgccgttctattcgttgacggaggattacttgccggacgagattaaccgtgaggatatcgcttttcttctgtggacgctcagttcgaagagcagtgacagttgcccgttcaacgacgtggagaatccgttggatgagacgttgcttgagttggcggacgtactttacgaacgtctggatgcggctttcgagtcggctcctatcagtgatgagctggcttcgaactggatgatggacaggaggctgatggaaaaggaacgtgaacctctgcctgagattgtgccgggagcggcattgccgacggatgtggaacattttctggaagccggtaaaggcgaaccgctcatgttctttgactcgtatgatgccctgaagtttttcttcgtccattctctgaaatgggaagacgatgaagagactttgttgcccgaactggcggagtttgacaacttcgttgtctatggcaatccgaaaggcgtgctggtggctccggatgttgccaaatactttgcagcagggaataatccgttgtatgacgctgcgacaacggaggaggaagcatacgagatgttctgtgaagggggattgtgcccgttcgatttgttgaagtatggcatggaacataacttgttgccggaggcgcaattcccgtttgagaacggaaaggcattgcttcacgacaactgggacttcgtggctcgctggtttctgagagaattttatgagggggactaataggtagcgttatgccgatcaagaaaaataacaacccttttgccggaaaggcaaagacaggaaccgggaaaaagaaaggctccggtaaacgagtggggaaatcaaagcccggaaaggctaataatcaattgaacagacgggtgaagtgacccgtctgtcttttttatcttagagtgatggctttcattatttatccgtcggttcttcctgtgctttccgttctttcttcttattgataaatccgattttcaagttggcggcttcctgttctttctttatctcctgcatggcggagaggatttgcgccaattcgtagacatttgccgcagcctggcggtcggtcgggctcatagtcgttttataggagcggtcgccgataaattccacacggatatttttgtccttgttgaagttgatgaagccgataacgttaccgtcctcccccagtttatagtccgctttctctattttctcattcatgtcggttgtctcataactgtctttggaggcgggagtttctgcgaagctgccgtcgggagcaatcactttgacccctacgtgatggatgttgccggaaccgcagtagatggaagtcatgctcatcttgcccagctcgtccacctgaaagcggaggaaagaacggtgcatgtttttttcgacagtctgcgtaggccatagataattgcctacctgttggtattccgcatctttctcaaggatgaatttgtctttgatggcattaaactcctcagtcttggcccggagggcgctgtccaggtaagcaagcgttttctgctgcgctttcgtctctacatccagcatcaatgcctgtcccgctttgcgtgcctcgaacgctttgggatacaaaatcttgatactgtcgatctgcgacttggcttcttcatagtcgccacgttcgtaggccgcttgggcaaccatcagtttctcattggcttttttctcgattccatttccgcaggcagccagtgccagtgttccgcaaaagaagattgttagttttttcatcacaaattctgtttactatttggttatttagggcaaaagtacgaatatatcccttatttttgtaattttgtcccctcaaaacttataactaagaagaatgatagagttgactcaagaggaattgaagcagcattttagcgagcccatcttcgggaagatagccgaaacggccgatacgctcggtctggagtgttacgtcgtaggcggctatgttcgtgatatttttctgcaacgtccctctaaagatatagacgtggtggtggtaggcagtgggatagcgatggcggaagcgctcggaaaacatctgggacgcggcgctcatgtctctgtcttcaagaacttcggaacggcacaggtgaaatataaaggtacggaagtggaatttgtgggggcgcgcagagagtcctaccaacgggattctcgcaagccgattgtggaggacgggacgttggaagacgatcagaaccgtcgtgacttcacaattaatgccctcgccgtctgcctcaataagggacgcttcggtgaactggtagacccgttcggaggactggaggatatgaaggagaagacgatccgcactccgctcgatccggacatcacctttagtgacgatccgttgcggatgatgcgttgtatccgttttgccacgcagttgggattttatattgacgatgacacgttcgattctctttgccgcaataaggaccggattgaaattatatcgcgcgagcgtattgccgacgaactcaataagataattctttcaccgattccctcgaaaggttttattgacttggaccgtagcgggctgctcccgttgatttttccggagctggctgccttgcaaggggtggaaacccggaacgggcgttcgcataaggataatttttatcatacgctcgaagtgctggataatatcagcaaaaagaccgacaatctttggttgcgttgggctgccttgctgcacgacattgccaaacctgtgactaaacgttgggaactgaaggcgggatggactttccataatcataattttatcggtgagaagatgattccgaatattttccggaagatgaagttgccgatgaatgagaagatgaagtatgtgcagaagatggtcagtctccacatgcgtcctatcgtgatagcggatgatgtagtgacggattcggctgtccgccgtctgctttttgaggcgggggatgacatcgacgacctgatgacgctctgtgaagcggacatcacttctaaaaatatggaacgtaagcaacatttcctgaataactttcaactggtgcggcagaagctgaaagacctggaggaaaaagaccggattcgcaatttccagccccctgtgagcggtgaggagatcatggaaactttcggattgcaaccgtgccgggaggtggggactctgaaaagtgcgataaaggatgcgattctggatggagtgatcccgaatgaatatgaagctgcccgcacctttatgttggcacgggcaaagaagatggggctgacaccggttatcggctaggtaatgttaccgaaaaatgtggattcggagtatgttgttcaaagatgatggctttcattttttttacaatgtccgggtgctggagggctatatcgttgtcttcgtggatgtccgtcttcaagttatacaatgagggacttcctttttttacgattagcttccagtcgttcatgcgcactgctatctggtctgtctcgtcgaattcccagtacaggaatttatgttgtttttgctttttctttcccagtaatgtcggtgcaaaagagattccgtcaaaatagtcggtctccttctttttattgcggtatttcttttcataattcttgatacccgccacttcgcagaaagtaggcattaagtcatagaaagcgcagatgtggtcgctcacttcaccggcgggtacacgtcccggccaacgagctatgaacggaatgcgtataccgccttcgtggcactggcgtttcaatccgcgcaactttccgtctctaccgaagaaagtagggtcggctccaccttcctcatgaggaccgttgtcgctggagaaaatgactaatgtgttctcgtccagccctttctctttcagctttttcagtacttcgcctacataataatccagacgggtaatcatgccggcgaattgagcgtgcgtatgggtaaccgcattataacgtgaccatttactacctttgaaaattttatcaggactaaactccgctttgtattcgttcagaatcgagtcctccggctgtacaagttccgcatgaggaagagtgtaggtgaatatgccgaagaacggttgcttgccatcttgtctgttcagccattccaaagctttttgatggataatgtcggcggaatattgaggacgcttccggtattcgggaccgaacatcggatacttgatgttttcgtccataactatgcgtaccactccggtatcacccaatgctttactgtaacggtttaagaaattaggatagtagaggtgcgcttgaaactggcagatgtagccgtagtattcgtctataccccgtttgtcgggagtggagcaggagccctcatagcctcctgcccatttaccgaacattcctgtagtatatccgttgtctttcattatttccggcagtatgatgtgctccggatcgtatggatgttgccctactaccgcgtattctttattgtccccatacattacggtgggagcatttttccaatattctttgtttccccgcacttcgcaatgaccactgtgctgccccgtcatgactgaagctcttgaaggtgcgctgacagggctaccggcatacgcctgcgtgaagcgcatcccttcatttgccatagcgtcgatatgaggggtgcggataaacggttgaccgtagcaggccaaatctccatatcccatgtcatcgcagagaataaataaaatattcggttgggcgtttctttgctgcgcatggatggataatgtaggcaaaagtaaagcactgccgatgaatgaaacagatgcgtaattcatattattgggttgtttgaataaggtttgtgtccggacgagtttaactcagctcaatgatttcttcacggcagttcgttagtttttcgataccttcgttcgtcaccacccaagagttttctatacctacaggacctactcccggaagtacgattttcggttcgagggcaaacaccatgtccggttcgagttcctgcttcatgcggggggccagtacgggagcttcgttgatttcgaggccgatgccgtggccgataaacttcgcttgctggttggttcccatgaatttgtctctgaatccggcttccgtcgctatttggatggcggtgtcatacagttgctcgcaggaaacacccggacgggcaatggaagctattttttcctgaatatccagacagacctgatgtgccgcataagcttcttccggcagttttccgatagagaacacccggctcatgtcgcccatatatccgttgaagttgccgcctaaatcgaccatgacgctttgtccttctttcaacggagtcttgttggctcctcccggcagggcagggtcgagaccttgtccgcccagtgcgaagtcgtatggagaagggtatccggcgttgtctcccgtgagtacgctgcccatgaagatttccatgctgcgtccgaacacccggaaaatgcccagacacccttgcaggcgcatcagacgttctatctcgatagagaattctatatccgtcattcccgaacggtatacgctcggaatctgttcgtaagcttttgcatgggcaatgcccgaacggcgtaacatttcgatttcaaccggtgtcttcacactacgtgcctgacggatcagcggagtgccgttcaccacttcggtctcggggaagagacttgccagacggcaatattccgtgtaaggaagttcgtcgccctccaacatcagcttggttggcatgggcaatccgttttctttcagcagatcgacaatctgttccggtttgcggatagggaacgaatgttcgcctgtgatattgttgggacgtttgaaaaacaacaatgcgggtgaatggagcggaagataaaggtaaccgctgacaacgcagccgtatgtataaatcagatttgtattacaagtaatgagcgcagcgtcaatgccctgcaacgccatcagactgcgaatcttatcgcgacggaattttaattcgggttgtagcatttttatttagttatttatttattcgataatgctgcaaagataattaattcccatcgaaaataacgttaatctcataaaaatagcgccacccgcgtcctgtcacaggaggcgagtggcgcaaaccacaaatacaaatacaactaaacaaagtcttctaaatgaatctagaaattaaaaattagaaattaaaaattaaataatttgtgaatcccaagccaaccagctcccgtccaccttctattttctaccttttaatctttaatttttaattatcaaatgacgccttgtcccatcattgcatgggctactttcatgaatccggcaatgttggctcccttcacatagttaatgtatccgtcgggctccgtgccgtatttcacacattgggcatggatgccgtgcatgattgcatgaagcttttcatccacttctgcggcactccagctgaggtgcatggcgttttgagacatttccagtccggatgtggcaacaccgcctgcgttgactgctttacccggtgcgtacatctttttatgctcgatgaatagatcgatggcttccggcgtacagcccatgttggaaatttctccgacacaaagtacgtcattttttatgagattttgtgcatcttctccatttaattcattctgagttgcacaaggaagtgcaatatcagcttttacttcccacggacgcttgccctcgacgaaggtcgcacccggatatttttccgcgtatggagcaactatatcattgcccgaagcccgaagctccagcatgtagtctatcttttcgccactgataccgtcgggatcgtaaacgtatccgtccggtccggagattgtaatcactttagcacccagttcggtggctttcgtggctgccccccaagctacgtttccgaacccggagatagcgacggtcttaccttttatatcaataccttttgcctgtaacatctggttcacgaaatacaaaccaccgaaaccggtagcttcgggacgaatcagagaaccgccgaactccaatcctttgccagtgaaagttcctgtaaattcacgtgtcagcttcttgtacataccgaacatataacctacttcgcgtcctcctacgccgatatcaccggcgggaacatccatatccggacccagatgacgccacagctccagcatgaacgcctggcagaaacgcatgatttcagcgtcgctcttgccgcgtggtgagaagtcggaaccgcctttgccgccacccataggcagagtggtcagtgcgttcttgaaagtctgttcgaagccgagaaacttcaggatggaaagattgacggaagcatggaaacggataccgcctttgtacgggccgatagcgttgttgaattgtacacggtagccgagattggtctgcacttcgcctttatcgtccacccacgtcacacggaaagtaaagatacggtcgggttcgaccagtctttctatgattttggctttttcaaattcaggatgttgattgtatatatcttcaatggacagaagaacctctttgacagcttgaagatactcagattcaccgggatgttttgcctccagagaggacatgattttttggatgttcatgatactatagtttaaaaggttaattctgataaaatgtcaactaactatctgcaaatatagggaaatatttggaatgtgattatttttaaggcgttattttgattaaataatgataaaatgatagttttggagcccaagaagcgcaaagccccgctacctgtgatgtaaaaaacaggtaacggggcttctatgtgttcgcaaatagaaagccggtctttagaatttcggtttcatgcccagattatacatgatgaatccgtaaatgtcggcttgctcttccagtacttttgccataggtttacctgcaccgtgtccggctttgctgtcgatgcggatcaaggtcggattggtcccgtcattgtcggcttgcagggtagcggcaaacttgaatgagtgggcggggactacccggtcgtcatggtcggcagtggttaccagagttgccggatattttgtgcccggtttcaagttgtgcaatggagagtaacctctgaggtattcgaacatctctttgctgtcttcactggtgccgtaatcgctggcccagttccagccgatggtaaacttgtggtagcggagcatatccatcacacctacttgcgggatggctacgcggaagaggtcgggacgctgcgtcatacaggcgcctactaacagaccgccgttggaaccgccgacaatcgctatcttgtctttatcggtgtatttctggctgatgagatattcagcggccgagatgaagtcgtcgaacacgttctgtttctgcattttggttccggctacgtgccactcctcaccgtattcgctgccgccacgcaggttgacttgggcatagataccgccgttttcgaggaacgggatacggttggagctgaagcccggattaagactgataccgaaacctccgtacccgtagaggaataccggatttttgccgtctttcttcaagtccttcttataagtaaggaacatcggaatcttcacaccgtccttgctggggaaaaacacctgttccgttacgaagtcgtccgagttgaactgcactttcggggcacggtacagttcgtagctgttcttgtccatatcatatttataggtagcgccgggaatggtgaacgaggtaaatccgaagaagcattccttgtcgtccttgttgccgctgaatcctaccgaaccgagcgagggcagttcgatttcctgcaactgcttgccgtcgaggtcgtaaacgtatgcgtgattggaggcgtctttgtcgtatgtgaggaacagtttgccaccgatcacttccgcgttggagagcactgcttccgattcgggtacgagttctttccagtcttccagtttcggacggttgatgtccgccaccataatccggtttttcggtgcgccgtagttggtgtagatataaatccggtcgccgattacttcaattgggtaatattggtaatcgaggtcggtggtgagctggatgaaaggagaggcgggctttttcaaatcccgtatgaacaggttgttccctcttccggctccggattcggtcaggaatagaatacgttcatcctcgctggtgccggaggtgtagaaacgtttcggataagccggattctggtaaatcagcttgtctttcgattggggttcgccgatcttgtggtaatagatcttatgattctcgttcacgttggagaactcttttcctttggtcggagcatcgtaagcactataatagaatccgtctccctgccaggcagcgtcggtgaatttggcccattcgatgtggtcttcgagcaacttgccgctttcggtgtccatcacgtagatttcagaccagtcggagccgcttcgcgagatggtgtacgcggtgtatttgccatcgtgtgagaaataaagtcccgtgagggccactgtgccgtcatccgacaatttgttggggtcgaggaacacgcgaggctcgccgtccaatgaatcttgtacgtagaacacgctttgattctgcaaaccatcgttcttgctgaaataatatttgccgtgtttcttgacaggagcgctgatcttctcgtaatcagccagttccgtcagccgtttcaagagattctcctggaaaggtatttggctcagatactcgtttgtcactttgttctgcgcttctacccaagcggtggtagctgcgctggtatcattttccaaccatctgtaagggtcgggaacttgcgtaccgaaatacacgtctacagtgtctacttttgccgtctcggggtagaccggctttttttgttggggagcgcatgacattaccatgattccactcattaataaagttacttttttcatgtgaataaaaagtctttttgaataaacttattggtacaaaactacaaaataataagagataaacaagtaaactttataaagaagatgatggaaaatgagatttaaagaactaactttgcaaaatgtgattttgaaacaagacgatttggtataagaaaggagaataattctatgcttagtaaatataaattaaaccagctttacttcaaagatacccagttcgccaatttgatgacccggcgaattttcaacgtgctgctgatagccaacccgtacgacgctttcatgctcgaagatgacggacgtatcgatgagaagatttttaatgaatatacttcgctctctctgcgttatccgccccgtttctcgcaggtgtctaccgaagaggaggcattggcgcagttggaaagtatgtcattcgacctggtgatttgtatgccgagcacgggagataatgacagtttcgacatcggacggcatatcaaggagaaatatgaacacattcctatcgtcattctgactcctttcagtcacggtattaccaaacggattatcaatgaggatctgagtgctttcgagtacgttttctgctggctgggcaataccgatttgctggtttctatcattaagctgatggaggacaagatgaatctggagcatgacgtgcaggaggtaggagtacagttgatacttgttgtggaagacggcattcgcttctattcttccattcttcccaatctgtataagttcgtgttgaagcagagtcaggagttctctacggaggctctgaatgcgcaccagcgtacgcttcgtatgcgcggacggcctaaaatcgtgttggcgcgtacgtatcaggaggcaatgaatatttatcgtaagtatcagaataatatattgggggtgatcacggatgtacgtttcccgaaggtggagcggggagagaaagacggtctggcgggtatcaagctatgtgccgagatacgtaagaatgatccgttcgtacccttgattatccagtcttccgagtcggagaatgcttcctatgcggcaaagtacggagccagctttattgacaagaattccaagaagatggatgtagacctgcgccgtattgtttccgataacttcggtttcggtgattttgttttccgtaatccggagacgggggaggagattgcccgtgtacggaatctgaaagagttgcagaatattctgtttgccgttcctgcggaatcattcttatatcacattagccgtaatcatgtgtcccgctggctttattcgcgggctatgtttcccgtggcggagttcttgaaaccgataacatggagcagtcttcaggatgtggacgcccatcgccgcatcatttttgaggcgatcgtgaaatatcgcaagatgaagaatcagggagtcgttgccgtctttaaacgggaccgtttcgaccgttattccaattttgcccgtatcggtgacggttcgctcggaggtaaagggcgcggactggctttcatagataacatggtgaagcgtcatccggagtttgatgagtttgagaatgcacgggtagccattcccaagacggtggtgctttgtacggatgtgttcgatgagtttatggacacgaacaatctgtatcagattgccctttcggatgcggatgatgatttgattctgaggtatttcctgaaagcgaagttgccggaccggttggtggaagacttctttactttctttgatgtggtgaagtcaccaattgccatccgttcttcgtctctgttggaagattcccattatcagccgtttgcggggatttacaatacgtatatgattccttatctggacgaccgctatgagatgctgcgtatgctttccgatgccatcaagggagtgtatgcttcggtatacttccgtgacagcaaggcttatatgcaagctacgtcgaacgtgatagaccaggaaaagatggctgttattttgcaggaagtcgttggtaatcaatacggagaacgttattatccttccatgtccggtgtggcacgctcgctcaattattatccgctgggtgatgaaaaggcggaggaaggaacggtgaatctggctcttggattgggaaaatatattgtggatggcggtatgacacttcgtttttctccttatcatcccaatcaggtgttacagaccagcgagatggaaatagctttgaaagagactcagacccgtttctatgcgttggacttgaagaatgcagggcatgacttttcgatcgatgacggctttaatctgttgaaacttcatgtgaaagaggcggaaaatgacggtgctttgcagtatatcgcttctacatacgacccgtatgaccagataatccgggatggtttgtatccgggaggacgcaaggtgatcacatttgctaatatcctgcaacatgatgttttcccgttggctcgtattttacagttggttttgaaatacggggaacaggagatgcgtcgtccggttgagattgagtttgcggcaacgttaagtcgtgatcaggataagacgggtactttctatcttttgcagatccgtccgattgtggatagcaaggagatgctggatgaggatttgaacgatataccggatgatgaggtgattcttcgctcgtataattcgctgggacatggcattatgaacgagattcaggatgttgtctatgtgaagacagacggctacagtgcttccaataatcaggctattgcttgggagatagaaaagatcaatcagcagttcttgaacgaggggaagaactatgtgcttgtcggtcccggacgttggggaagcagcgacacgtggctgggtattccggtgaagtggccgcacatctcggcagcccgtgtgatagtggaggcgggactgactaattaccgcgttgatcccagccagggtacgcatttcttccagaatcttacctcgttcggagtgggttacttcacgatcaatgcctttatgaatgatggtgtctacaaccaagagttcctcaatgcgcaaccggctgtggaagaaacgaagttcctccgccatgtccgctttgaaaaaccgatagtagtcaagatggatggaaagaagaaacttggggtggtgctgatgccgggagtatagatggctttatataaaaatgaaattggtggaaataaagaggaactataattatattatgagtctattaaaaaaaataacactcgtgtctgaatcaataggtcttatattcaataaatgtaggggggtaacgttctgtttttcatctaaaaggtgaaattcttttgtgataggcttaaaaatatggcctttttttaaggtcgggcaggctaattgtgttctcattttcatatttcgggataaatctttctttggatactttattataaagaaagaaaactgtatttttgcggtcgttttttaagatataaagagattctagagagatgagtaacagacaattagtaaaactggctttttgtgtatgtctcctacctttctttttttcttgttcttcggaacgtgatgagggaagtgaaggaaatggaacattacgtgtacaagttagtgcaaatgccgaagtattagtgggaacaaatactcgggttaatgatggaatagaacaggaagtgcccgatgtcaatgatttctctttttctatatttaaaggagaaactcttcgtggagagtgggctacattagctgagtttttggctgatgatgagttgactcttcggtctggtaataactatgtagcgaaggcttcgtatggcgatgtcaataatgaaggtttcgagttgccttattatgagggaaatcagccgtttgttataaagcggggacagaccaccactgtggaagtgacctgttatctggcaaatgctaaattgtcgattgtctatacagatgaatttaaggactacttttctgagtatacggctgaagtcactacttcgcttggcaatacagtgaactatgtttctgatgaaacacgttatgcctatttcaagccgggagaagtacaagtacgtgtgaaggtaaaaaagaaggagggttattcacaggaagtaactttgaaagttggcgaggattatgctcttgaagctcgccatgcctatattctgacgcttgatttggatgcaggtactccttctattaatatatcatttagtgatgatattcctaatcaggaacctgtgaaaatcactgtttcggatgaggctttaagtgctccggcaccttattttacagcaaatgggtttaatgatgaccaaccgattgacgttgttgaaggaaaatcagcggaagcttcagaagtgtatgcttatttgaatgcagccggtggaatagctcattgttatttgacgacccattctttttcgttgatcgaacaaggatggcctgaaactgtggacttgactagtgtgtctgcagaaagtctgagcgcaatgcagaagttagggtttcagatggcaggattgggtgacaaaaaagataagattgcaaagattgactttacaaatgtagtaccttttttggaatatacggaagagggtacagaacatctttttgaactgcgggctactgataaattgtctaaagagaatgtggaaccattgaaatttagagtttccagtaaggataatctgtttgcggtgagtgcaggacaatcagttctttatggtacgacgaagatgaaggctaatttgactcttgacggtgatcccgccaaggtgacctattggttgaagaaaggcgagacagaacagcaagtagtgccaagttccataaagtcgaatggaacatcacatgatttgctgtttaagtttgatgaatcccaatatgctgatattcagatggaggctcggtatttgcgacgtaaagggacattgaattcggctatgggagatcctgtggtacttagtttgcagtatccaggagatgtttggacgaaacaggctacgttgcagttaaaaggcaatgtagatggatggaatttcctatgctctcagaaggataatgacggaaatgatggtgtatggaatgctataaattgtcctttgtctggttctaccatttctttgactaatttaattccggctaccggctacacttatcaatttaccaaaaaagatgaagaaggtgatattgtgggggcttcgaatcaattgagtattgagacggaagcagaattgcagattcctaattcggattttgaaacgtggagtgagaagtttgtgtggaaaggaacaggaaaacctgggagcatagatatttatactttttacccttatgaggatagtgatttggatccttggtggagtacacagaatgatttgactacagctaaagcaggcatttactcttattattatgtagcatatccaggaactacttatgtgaattcttcttggtcggctagtactagaatgaaattatctacatctccaattaatggttcatattccgcagaaatagcaactattggatggggggaaggcagtacctgtacaacaggattaccttggggaggtttgagttgtaacaagaaaacatctagcactttgtatattggaaaatatgatatatcaacaggagaagttcatggacatacttttgcttctcgccctacgcaaatgacttttaattatcgtttttactcatataatggagaagctgcttccgcttcgattcaaatagaacatagagaaggagataatattgttaatttaggaaatggatatatgaatttatcgacaactaacactgataaggctactttaaatatatcctattcaaatgaagaattacaaccgacacatatatctatcgtgtttttgtcatcaacctcttctagtccggctattaaagaatatagtggagagattaatacttggagtggtaatgccgatactcgtggtataggaaatgtcttagtaatagatgatgtacatttagagtatgctaaataatgaattaaagtgaattgatgaatatgaaacaattagttaaaataaaaatattagcaatatttgtagcaagccttttcatcctctctgcttgcgatcgtgaaaagatggacttcggcaacgaatcggatggttatggacaaattcaattgtcctccatgcaactttctgtggatgtaaatgcgacaccactgtctcgtgctgtcacagtagatgctggtagttatatcgttggtatttacaatgaagacggaacaactttaatttccgaatggaagtatagtgatatgcctgaaatatttcaattgaaagtcggcaaatacaaaatcatagcccattctccagatggaggagaaccagtgtttgatgttccttattgtcaaggttcgcagagtattgagatacaaaaagatcaagtgaccaatgttgctaagatagagtgcaagttgcattgtattatggtaaaaataggttatacggacgaattgaaaccgcttttgggagacgataccgaagttacggtaacaataaatagcaatgatcaacttacgtttaagatgggagatgaagtacgtgctgcttattttcctgccaatgaaagcggtaatattgtcgatttcaaatttttgagcactctaacggaagatggaataaaagatgaagtacagacagtgaatacgcgttcggtatccggtgtatcaatcggttatcttgtaaccatgacttataaattgagcgatgctgacggtgatccgaatactggaggtgatgctaatgcttctgtgaaagtggacaatagctgtgatgtggaaaatataaatggtggtgttcgtcctgacgaaccggaaatagatgatttcccggatggtgggggtgatgtggacggagagcctacgattacctgcaagaagtttgattacgttcttgatgagactgtgactgaagagaacccattggagattattgtgaaacttaatgcgtcggaaactatcggacatgtgaatgtgcaaatagaagcgggtgatgatttgtttggagatgctatcaaaatgatgtttggtgaagctggaacttttgatttggctgaaccgggagaatataaggaaacattgacaagtctcggttttcctgtggaagagcaggttgtaggaaaaacggagttggattttgtaattactcaatttacaccgttattgaggaattttccaagtgagaaaccgcacaaattccatattactttaattgatcggaaagggcagagtgtatcgaagacgttaacatttactataaaagaataaataggtaagaaatgaagataaaagaatattatttatattggttattacttcttttctttttcacaggatgtcagcgtgacgaatatactgcgactgatggtgaggggagtcttcggttgtctattgggatgaagaatgatttgaaagtagtagctacccgtgctcttacatcggaagaacaagctatcttggagaaggactgtaaggttcgtatctaccaacgtgaaaaagaggatttgaaactggtacgtaagtatcaaggagtagaaaatgtacctgatgatattttgcttgcttccggtgattaccaagtaaaggtgacagctggagaggtggtttctgcatcattcgataagaaattttatgagggtataaagtcttttactataacaaaaggggcagatgtaaaagttgatgtcgtggctaatgtaggtaatacagtggctactgtagcttttgcagagacaatgaatccttattttgaaaattgcatggtgggggtggctgtaaaggctgaaaatggaattcttgattttacggcagatgatgtcggaaaattaggatatttctctgttcctgttgcttgcgatacgctattttgtacatttgaggcaaccaataagcttaccggagaaccgtttgtacatatagatacgattcccgatgtggtgtcggctacactttacaacttgacttatgaatttaaggaatcggaagtggaagtgccggataccggagggggaatgataaatttggtggtggatgtaactcctattggagaagtggaaacagaagagacgatttatcgccgaccgtcagttaaagctgaaatggggggacaaaatttagtcttgacacaacctgcatacatgaaaataggtgatggagaggatatgacggtgatgataaagggttctacaaaactgacgcagattgaaatagcctctgaacagtttccggattttcttggtgcacctactgcgcaacaggcttttgacttgaaaaatctgacaactgaggaagaagatctgctcgcaaatggcggaatcacgatcgataaaaaagaagcttctttggggcatgctatggatataaatctttccgcttcactaatccggaaatatacagcggagaatggtacacgtagtattcgtttttctgtaacagaccagagaggctatcagcgtatagtagactggcaaattgtggcttctgatattgctgtacaaacagtcgctattccggatgataagaaatatcttatatgggcaacaaaggcgactttgttcggtgaagtgctgccggaacgagaaccacaatcagaattgtcattccgctaccggaaagtgggaactactgaatggcagacggtgcctgcggtacgaaacggttctgtacttaccgctgaggtgactggattgaagaatagtgataatgaacttttctcagaatatgaatatcaagttatggagggggcaatggcatccaatgtaaaatgtcagttcacgacagaaaagacgctccaattggagaattgtggatttgaggagtggtcgggaagtaagcctatgtatattgcggcttcaagcagtgatttcttttgggatagtggtaatcatggttcctcttctgtttctgcttttgctacagatttgacaacagcggattcttctgtgaaagtggaaggcaagtattctgcgaaattacagtctaaaaaaatagttattaagtttgccgcaggaaatctgttcatcggtaagtatttggatacacaaaaaatgaatggaattttgggatggggacgttcgtttacctcccgtccagttgcattgaccggatatatacgttatacttcgggaactgtagataacggaggaaagtatatcgaaaatggagaacaagacaaagggcaagtgtttatagcactaggagactgggaaggacaaacttacggtggagaaacttggccgttgattgtggatacgagagatactgctactttttttgatccgaaaggagataacgttatagcttatggtgaacagacatgggattcgtctaccgaaggtgagaatatgcatccctttgttatccgtttgaattacagtcttgaacgtattcctacaagtattgtagtggtggcttcggcgagtaaatacggagattattttgagggaagtaccggcagttctatgtggttagacaacttgaaattggtatatgacgagagtgaattggaagaataaacttataatgattatagagtgaaaaaaatattattattcttgttgtttatctgggggataactactcaggcacaagagtttaaacgcaatatagaacctcgaacatttgttccgaaagggcagtggattgtaggaagttctgtttcttattccgagcataatgaacaaaattatcaatttctgattgttgatggttttaattctgacggatacacgtttaaggtaagtcctatgttttgttatgctttgaaagataatttggctgccggaggacgtttttcgtacggacgtacgctgacaaaattggatggggtgacattgaatctggatgatgatactaattttgatgtaaatgacctatatcagttgaagcattcttatagcgtgattggtattctgaggaactatataaatataggtactagtaagcgatttgctctttttgcagagacacgtcttgagatgggaggaagccagtcgaaagtagtaacgaagaatggtggaaaattgagcggtacttattcgactactgctgatttcggattaggagttgcacctggaattgttgcttttattaataattatactgctgtggaagtcagtgtcggagttcttggacttgacttcagcaaggtgaaacaaacaacagaccaagtgtatgtcggtgaacgttcctccagttcggcaaatttcaagattaacctgttttccattggtttaggtattgcattctatttataaaaaaaggagaaaatgagtagtagattaatctatatatgtgctgtcattctgttggttggcatacaggagatccgggcacagcagcgggataccattgtaatacatgataccgtatatgtggataaggcggagttggagcaggtgcatgcggaaaaggatattgtagaagacaataccggactgattcgaatcaaaccgatcggacgttacgaccgtggtatcatcagctatcgttttattccgaagaaaaaatggatgggcggtttgactttctcttatgttaattttgacagtgatgacagtagactgttattctcaatattgaaagattttgattgtaatttcaaaacgttctctgttaatccgttcgtcggatatgcgttggcggataatttgattgttggtatgaaactgggttatagtcatacgattgctgatttgggtaatgtgtcgttgaatattgatgatgatttgaatttctcattagacaatatccgttatacggaaaatttacgatcgatcggcatatttcatcgctcatatgtagggcttgaccgtggtaaacttttcggcttgtttaatgagactacgctgacttacaaacgaggttcttctagtttctcacgtggagaaggtgaagaatttaaacgcactgacacaacgataaatgagttgcacttgggcattaatcccggattggcggtatttattacgcaaaatgtttgtgctgaattatcctttggcgttgtcggatttaaatatcgtacagagaaacaaaagaataatctgggtgaagagggtaaacgtagagacagcggcgccaattttaagataaatctttttaatataaatataggtttaaccttttgtatgtaatgaaaatgcgggctatatataatttattgctaggtgctgctgtgattactttattacaggggtgtatcaaaaatgatatcgattatccacaaatagctttgtccataaccggaatgcaagtagagggacaaaaagaaaatgcggtaatctcggagaaagaccgcactgtgactttgaaattggaagagaatgtcaatctgcgaaaagttcatgtgactaagctttcggtgacagagggagctaagagtacacttgctccacaagatataatagatttaactaatccttatgaggtgatattatctctttatcaggaatatcgatggaaagttattgctcagcaagatattgtacgtatatttaaaatggcaaaccaagtaggactgtctgagataaatccggatacgaaagttgctattgccaatgtgaggaaaaatactaaatggaaagaactggacctcttggagctgaaattagggccgaagggtacaacatataatggaaaaacggaagtgccggaactaaaatggacactctattccaattatgcctctgcacaggtaaaggtgcaatatcaggatttctttgaagaaaattgggagcttcgtgtttatcggaaagataaagatgtggaaatgaagcgcgcagacggttgggtaaacgtggcatggctgtatgcggagggtatagaaggttctgataatggatttgagattcgagaaaccacaaccgaagagtggaggaaagttgataattcatatattacagcggatggtgcagccttttccgctcgcataccgcatttgaaggaacaaacgacttatgtttgtcgtgcgtattcaggtgaggattatagtgaggagttgccttttactactggaatagccaaacaattgccgaatgctaagtttgatgaatggcatttgaaaggcaaagtttataatttttgggcagaaggtggtgaggagttttggggaagtggtaacaagggagcttccattctccggagtataacgacaccagacggaacgaatacttggaatggacagacgggaacttccgtaaagatggaatctatgtatgctgttatcaaatttgctgccggaaatctgtttgccggttattggtacgattttgctgaaggtagttttacagatggacatttaaaatttggtcgtccgtttaccgagcgtcccacgaggttgacgggatattataaatatactactggcccggttaatcaaatggataaagattcggataagtatgatgaactatatcctttattaaaggataaagatgatacttgcatcatttgggttgctttgggagattgggatgctccgatagatattatcactgctaagacttccagtaaacgtaaaatgttcgatcagaatgatcctcacgtcattgcctacggagaatttactcagggaaaaacaattaataactttgaaccttttgaggttgaattggaatatcgtgacaccaatcgggttcctaactatatattggtagtatgttcgtccagtaaatatggagactactttttcggtagtgatcaaagtgtgatgtgggtagatgactttactttggaatatgattataatgattagatttttattttttccaaagagatgaatactattaaaagagcatgcaaagatagttgtgacgacacccgggtctcaggcataccaacacccgggtctcatgtatgctgacacccgggtctcagtatgcacgacacccgggtgtcgtacaaattgtttgtgcataaaaaactcccgttcttcctttcggaaggcgggagtttttaactatagcttatttatatctgtggctaattatacgataccttgtgccatcattgctttggcaaccttcatgaatccggctacgttagcacctttcacatagtttacgtatccgtcagcttcagtaccgtattgaacgcaagctgcatggatattcttcataatgctcttcaacttctcgtctacttcttcagagctccagctcagtttgatagagttctgagtcatttcaagaccggatactgatacaccacctgcattggcagctttacccggagcataaaggattttggcttcttggaatacgcggatagcttccggagtagaaggcatgttagcaccttcggatacagctatcacaccgttagcaaccaatttcttagcatcatcaccgttcaattcattctgagttgcagaaggcagagcgatatctgctttctcaccccaaggacgagcaccttctacatatttgcagccatatttttctgcgtattcacggatacggccacgatacagattcttcaattccatgatgtaatccagtttctcacggtcgataccgtccggatcataaacgtaaccgtcagagtcagacatagtcagaaccttaccgccaagttcaagaaccttttctgcagtgtattgagcaacgttaccggaaccggaaatcaagcaagtcttacctttcaagtcagtacctttggttttcagcatttccatcaggaagtaaatgttaccgtaacctgttgcttccggacgaatcagtgaacctccgaattcgcggcctttacctgtgaatgttccagtgaattcgtgagtcagtttcttgtacataccgaacatgaaacctacctcgcgaccacctacaccgatatcaccggcaggaacgtccgtctcaggaccgatgtgacgccataattccaacatgaaagcttgcacgaagcgcattacttctgcgtttgatttaccacggggagagaagtcggaaccacctttaccgccacccataggcaatgtggtcagtgagtttttgaatgtctgttcaaaggcaaggaacttcaagatagaaagattcacggatgagtggaaacggataccgcctttgtacgggccaatcgcgttgttatgttgaacacggtaacccatgttagtctgaatgttacctttatcatccatccaagtcacgcggaactgatatactctatcagggatacacaaacgttcgatcaagtttactttatcgaactcagggtgtttgttgtattcttcctcaatagtcgaaagtacttcttctactgcttgatgatactccggttcattgggaaatcttcttttcagatcgtctaatacctttgctgcattcataatctttttttcttttattggttgtttaaaattcgattatctatttctcttatgcgattgcaaaagtaaagataaaaattaaactagcaaacattttataaagaaaaatgcgataaaatatcaaatttgatattttatcgcattaaaaataggaaaaaagatatttatttattcctttttatcgacttataaacaggaatgaatactaatgctgccgaaatgacaagcattactactgtcatcccatcgatccgttcggcttttgtgagaactaaatagcaaagcgccaaccaaagcaggctaatgcaaactatttgtgatttggataacggtcttctcattagccttcttttttcttcttgtctacgatagcgtcaattaccgctacagctgtaatattaacgatgtcacgtacagagctttcgaaatcggtgaaatggatcggtttgttcaatcccatttggatagggccgataaattccgtatccggatccattgcttgcagcagtttgtgaccggcattcgctgaactcaggttcgggaaaatcaatgtatttacatcttttcctttcagacgggtgaacggatacttggtatcacgcaattcgcggttcatggcgaagtttacctgcatttcaccgtcgatagccaattccggatactctttctgcatataatttacggcttcatgcacttttacagggcttcctgttgtatcagcaccgaaattagagtaggacagcatggccattaccggagtatggttgaagaaacggactgttttgtcggacagcttggctatatcaatcaatgtgtcggtatcggggtggcggttaattaatgtatctgccaggaagtaggtacccttcttggagttcagtatgtgcatggttccgaaatgtttgaatcccggttggatgccgatcacttctttggcaaccttgattgtgttgctgtatcttgtataaagtccggtgatgaacgcatcagcgtctccggtttctaccatcatcataccgaagtagttgcgctcgaacattttatcgttggcttcttcataagtaaagccttcgcgtgcacgtttttcggctaaaatacgggcataacgttcgcggcgttccgactcgtccggatggcggagatttacaatctcgataccctccagactcagatccagttcctctgctaattttccgatagcctcatcgtttcctaataagataggatgacagataccttccgattttgcttcaacggcagctttcagcatattggggtggattccttctgcaaatacgacacgttgcgggttgcggcgggcagtatcatatagttggcgggtcagtttggattcgtaacccattaattcgcgcagatgtacacaatatgcgtcccagtccttgatttccgtgcgggctactccactttccatcgcagcttttgctacagcgcaagacacctctgtgatgaggcgtgggtctaccggtttcgggatgaagtattccggaccgaaggaaaggttgtttacatggtaggccgcgttaacaacatcgggtaccggctgttttgccagattggcgatagcgtgtacggccgcaatcttcatttcttcattgatggctttggcatgagtgtccaatgcgccacggaagatatacgggaagccgattacattatttatctggttcggatagtcggaacgtccggttgccatcaatacatcggggcgggctgccatagcgtcttcgtaggaaatctccggagtcgggttggccaacgcgaatacgataggcataggagccatgctacgtaccatatcctgactcaatacgtttccttttgacaggccgagaaatacgtctgcacctttgatggcttctgccagtgtatgtatgtccgtgcggtcagttgcgaaatatttcttctgttcgttcaggtcagtacgtgttttgctgataacacctttactgtccagcatgacaatattttcgagacgtgcacccagtgacacatacagtttagtgcaagatacggcagatgcaccggcaccgttcacaacgatttttacatcttcgattttctttccggctacttgcagggcgtttaccaatccggcactggagatgatagcggtaccatgctggtcgtcgtgcatcacagggatatccagttcttctttcagacggcgttcgatttcaaagcattccggagctttgatgtcttcgaggttgataccgccgaaggtgggagcaatagcctttacggctgcaatgaatttctccgggtctttttcattgacttcgatatcgaatacgtcaatgccggcatagattttgaagagcagacctttgccttccattaccggtttgccactcaatgcgcctatgtcacctagtccgagtacggctgtaccattggaaataacagcaacaaggttacctttcgcagtatatttgtatgcgtcttgtggattcttctcaatttcgaggcaaggttctgccacgccgggagagtatgcgagtgctaaatctgtttgtgtactatacggtttggtagggactacctcgatcttaccaggtttgccctgtgagtgatagagcaaagcggcttctttggttattttagccatagtatctgtattttttattaataagttatcatttggctgcaaatgtaggaataaaagttatatattgtagtctcttgttggtaaattctattaattttatagcaaaatggctgaatttgtgagaggatatttcagtctgtgtgttttttccggaacaaatgttaagctgcaagccttttttttgtacttttgggcattactattaaaaaaggtatgttcatagcagacgacaatatattaggcagattggaaaatgatgaaaaagcatttaaagagttggtggatgcctactatactcctctctgtgtttattcggtacagtttacagattctttggaggtttcggaagatattgtgcaggattttttcgtgcgtttttgggagaagaaactttatcgtacagtcaatggaaaattgaagcaatatctgtttaattccatccgtaatgcttctattgatcatttgcgtaaacatcagtctttcgtatttacggagatagaagaacacgcctatattatggatgtaaatccggacgatgaagtgccggaagagcaacttgcacggttgcgtcattatttgcagcagctttctccacaggaatatagaatattgatggaagttgtcgtacataataaaaagtataaagaagtagctgcagaattggggatatctgtcaataccgttaaaactcatctttctcatgcgttgaaatatttgagaagttgcaagtttattactctattttcacttttttctctttaaaggctaaagtttttcacttttccctcacccattttacagtcttttacgtcatggttgtaaaagaatgaataaatatgttatcagaagaagaatttatagaattatgcagtaagtacaagaaacacgaattgactgaggcggaataccggaaacttcggatgtgggtggatggttcggaggaaaattaccgcttcttttcgaactatgtgaaattgtataaggctgagatgcgtgcggaaacgtaccgacaggcggatccgtccaaaggctggcaagccatcgagcgtaaaagaagggcttatcgtttgcggcaacgtctttacagggtggttgttgccgcttgtctgcttactgctgttatactaggtgcattctatttcaattcctacgatgagactcccgttgtggagaagcctgtaactttggcggaggtttttcccgatctgcctaagaataaggtaacattgaccttaagttccggtcaacagattgtgctggataaggacagtgtgcaggctatttctgataacggtttggcagtagccagcggtagtaatacctctcttaactatcaaaaagtagctgctaatgatgtatcagtaccccaatacaatacagtgaccgttcccgaagggagtacctttacgctgactctttccgacggaacgcaggttacgttaaattcctcttctgtctttcgctatcctgttgctttcaagggagaccgttgtgtggagttgataggagaggcctatttcgatgtgacacatgacggaacttcttttgtggtgaaagtagataataaagaagtggaagtactgggtaccagttttaatgtttccggatatagcaagaagagtatgattactactttggtgaaaggaaaagtagaggtgaaaagtggcgggtgcaggagactgttgctgcccggagaacaagctacggtggatgatgagaagggagtgattgatatagctagcgtggatacggaactttacacatcatgggtgtccggtaaatatgattttacagaaactccattgagcaagattctgagacagttggagttgtggtacggagtgagaatcgtatataaagatccgcaagttcgtgatttacattttgacggaactgtatttcgcaataaacctttgggcttctcgttagaaattatccggcaagtttccgatgttcggtttgacagagaagacggagttgtttttgttagcctgcacaaatagcttccttataagaaaatacacatagatatgtttcacttatacaatatagaatagtatgcaaaagaatgagaaaagaggttttctgctatctgaacaaatccggattccggttgtcgttttagcattgttgtttgcatttgtattgccttctgtggcaaatgtttttgatgatgcaaagctgataaccattgtcaatcgtgacatttcggtaagggaggctttggaacaggtgaaaaaacagagtggagtgtcattgatgttccagtccggtattgtggagaacaaaccgcatttgagtttggatttgcggaaggtaacattacaaaaagcgttggatgtgatttgtcccgcagcgggtttacagtatgtgctgaaggatgattacgtactgataacgaaagtgagaacggagaagcaggcattacccaaacagaagataaccggtatcgttacggatgaggcgggagaaccgttgattggtgctgccgtttatgttgaaaacgggaatcatgcgaaaggagtgataacggattataacggtcgttatgagattaaggcggctcttgacgaagcgttggtcttttcgtacgtcggtatggcaaagcaagtgcttgccgtcagcgggaatgtgatgaatgtcacgctgaaagaggaatccaaaatgttgggagatgtagtggtgaccggttatcagacgatttccaaagaacgggcaaccggtgcgttcgacatcattaaagaaaaagcattggagaaaccttcggtgactattgccgaccgtctggtaggtaaagtggcaggtgtgcaggctactacaactgctgatggagagatttctttcaaaattcgtggtaacggtacgttgcagtccgatgcagaaccgctgatcgtcgtggatggttttcctatttccacaggttttgcctccatcaatccgaatgatgtggcgaatatttcgattttgaaagatgctgccgctgcttctatctggggagctcgtgcttcgaatggcgtgattgtagtcacgacgaagaaaggaaacaaagccaaaggtcttacggtggaagtggatgctcagttgcgcattggaaataaggtggatattgattatctgcgcaatatgatgtccagtgcggaaagtatagagtatcagaagaagtctttcggcacatatttggctgatccggtgagtccctcgtccacaccggcttcattccctgaattttccagagcatatcaatacagatacaatcaggctgccgtactgtataataagtactcaaagaatgaaatctccgaaagcgaatataacacgggcctttcttctcttgctgctttggacaataaacggcaaatctcggatgaactgctgaaacgtcctatttaccaacagtataatgtcactttatctggtgctacggcacgtatgaccaattatgtttccatgctttacgcttatgatactacccgctatcaagggtctgattcacagaaattccagttcgattatcggggaaatataaagttgttgaagtggctggaaatggatgtgtctgctatggctttatatcgtaagaacaacacttcgggtgcaacggccagtgatattgcagagcttgcgccttacgatatggtattgaatcaagatggcagttacactgatatgagctatattatgcaatacgctgatggtataaatcatatgctcaatcaatatgattttccttattccgattggagctataatttgcttcgtgaggtgaatgggcgtagtctgtccaataaaaccatgaacaatcgttttcaagtaggattgagagctactattcttgagggattgtcagtgagtactaaattccaattggaacacgtgcaaaaagattcacgtcaattatacacggatgaaacgtattatgtacgcgatgtagtgaatcgttttactacactcgatttaaataagaagacagctacggcacacattgagaaaggtagtattttgaatgaaggtaaatatgcgacagatgcatataactggcgtaaccagttggattttaaccgcacttttgctgaacgtcatgcaatcaatgcggtagcaggtgtggaagtgagccaaagtaaaataaataaccgtacttttgctcctatttatggttatgatgataattatctgacctccagacctatccaggaagtggtggtgacgaattgtttcaatgaaagaaaagttcccattccggtaaagtcgatgttccgatatagcttgcaacggtatttttcagcatttgcaaatctggcttacacttttgacgacaagtattcgatttcgggttctttcagaacggatgcttccaattttatcacagatgatcctaaatatcgttattcgcccttctggtcggttggttttagctggaacatgatgcacgaagattttatgaaatctcagcattggctggattatttaacaccgagaattacttatggatgcaatggtaatgccaatactaccacttctatggtcccgttgattacgatggcgggtgtcagtgatattacacaggaacaatatgcacgtatctcttcttatggaaatccgcaaatgagttgggagcagacacacgtggttaacttcggtattgattggtctatgtttggaggtaagctctatggtaaaatagatgtctataataagaaaggaacagacatcatggccgatgtgtctgttcctatcgcttccgggcaactgaaacccggatttaatatagtagacgctaagattacggcgaatgcggcagaagtgacaaatcgtggctttgaaatggaattgggcactagccaggactttggcgcaggtgtacattgggatggaaatgtaacgctggcatataataaaaacaaagtagacaaactctatttgggttatgttggtcatgataagatgcgtgatcctattccaatagaaggttatgatatcaatggtttgtgggcgtatcagtatgccgggttgagagaacggactgatgatgaaggaaatacttataaagttcccaatatttatgtggataacgaaggtaacacagctccgattgataacatcttggaaaatacggatggcagaaaagctatgaaatatatgggcactacggtggctccgtggactgtgggaatgagtcattctttcgaatataaggagtgggcgttgtcattcacgatgatcggtaagtttgggcataagttccgccagaccggatttaattatgctgatccgttggtgactattcctaaccgccaatatactcagttgcaagatgagaccgtaatgccgatgccggataataagtttatcaacttgtcccattatttcagcatttctccctatatggattataatgtaaagagtgctaatcatgtgcgtatgcaagaattgacattgtcttactctttgccccaggtattgttgagaaaatggggaattagccgtttgacttgttatttgcaaggcaacgatctgtttaccataaaggctactgatgaagatccggaatatgcctatggtggttttcgtttacaaccgacctacaccatcggagtgaaatttgcatattaagaattctaaaacaagatagattatgaaatatataggtaagataggtttgactttgctggttacgttgattgtaagcagttgtaatgattttttagatgagaagcctaagaaaggtgacgggatagaactggagacttttgaacaattggaggctttgcttgccgcaaggatggaacccatagatcgaacggctatattggattgtaatgccgctcaacgttatatgagtgattgttatgaaatgccgatgaatattgcgatgggaatggttgctttggctgattatacggctttggaattgaattgcttccaacctaaatatacagcggaaatacaatcttccaattccctttggttatgtgcttataagaatatttttatggccaataccgtgttggcttatctggataaagtaacgggaggtacttctgcacaacgggccactttagcgcaacgggcacattttatacgtgcctataactattatgaactggtcaattgctactgtgtgccttattgcgaagccaatctgaaagaattgggagttcctataaatatcagtatagaatataatgagaattattcgcgtggaaccttaaaagatgtgtatgacctcatagagagtgaattggcacaggctttgcctctttcggtaccattaatagaaggtggtgaacgtaaaatctggcgtgagaatagtgcagccgtcaatggttttgccgcccgactctatctgactatgggggattatgccaaagccaaagactttgcagaaaaggctttagcttgtgatggtgaattggcggattataatacagatattgaaccggttgaggaatttgaagacggtaatggagaacttcgtactgtgactacatggtatgacgaatcgacgtttgatatgacaggcctattaccgggaattaatcagaagtcttattatagacgttatcattttacagattcatgggccattccaagtgccaaattgcgggaggcttttgatacggacaatgacctgcgttacaaatatttttattatgaggagtatatttccttatgtataatggggatgggagttgagtattttgaagatgaagctccgggttacagttattataatggagatgatttcgattccggaccttgtgtctcggaaatgctgcttatcaaggcagaagctatggctcgtcagggacagtggagtgatgcgttgatgtatctcaatacaaatttccgtccttaccggatttcaagtgaagcaccggctgacgccgttaatctgactgctgctaacaaggatgaggcgattgatgtaatattgaaagagcgtatgcgggaatttccgtttactttgcgttggcatgatatccgccgttgcaactttaacaacgacccgaatgatgatgtgactattactcgtcgattctataagttgagttctaccggtgctcattctcctatatttgatgatgaaactgtagaatatacccttaccccgaaaagtaataaatatatctatacaatggctattccgtcgacagaagtaacggtaagcaatgggatgatcgaacagaataaatatgaataataacataataaataacagtaatggtgaaactgaaaatttataaattggcttcaatagctttggccttaggaataatgggagcatgcaaaccggctccggctactctgacaggagaaataaaggactatcggggagggatgaccgaatgcatgataaagacagatactgatgttattgaagatagtttgcaaatgaatgcggatggcactttctcttacacccgtgatttccccgaaggagccgagatatggctgacgtcggaagatgcacagggatttgtccgtctttatctgaaaaatggtgataagcagcatattattcttactgccagtgccgattctatctatggtcgttgcgatgtaattttcagcggggataccaaaagttccgagtatttatgggcatttgaccatgaattcggaagtttgacaaagtggactgtcggggaagccggcaagtatcaatcatttaaggaatataaagcggctatcgatgtgactgccgatcaattgagaacacaattggaggctacgaaagataagaagttcatagcatacgaacagaagaaactggaaaagaagcaattggcaattcctttccggtttgcttgggcaaagatgagcaataatgaaccgacagatatggatatggactttgttgaatacattgaaagtctggactataacacaatagaaagtgcgaaggccggtttgataaatatgtatatcaagtggtatttgtcttgtcatacagattcggttatgacaccgggtgaacagttttttatagttctgaaggataaagtttctgaccaggagattattgattatgtggccgacagctatatgaccacctatatggaaaatggagcggatgcctatcttgaatctacatttgaggcttatgaaaagactacaacccatcaggataaagtagaggaactacgacctctatatgataagattataaagattctgccgggaactacagcacctgattttgcgttgcaggatgtcaatgataaacctcttaagttctctgatgtgataggaaaagggaaagttgtttatctcgatgtgtgggctacatggtgtggcccgtgttgtgctgagattcctcatgtggaagcgttggtgaaacattatgcaggcaatccgaatattgaatttgtcagtatttcgttggatgacaacgttgccaaatggaagaataaactgaaagcggataaaccggaatggaggcagtttataactactgatggtatgaagtctgatctgtgtaaggaatatcaaataaatgggatccctcgttttatgctttttgataaagcgggcaagattataacgaccaacgctccacgtgcttcggacagtgaaattcagaattatttggataatgcgataaaataactgatataatgcaggagagtgtgatttatacaataatatttgcttaagaattataaaatcaataactttgcgcctgaatagaaaaaacatctcatttatatgaaatatttatcttacatattggctttatgggtgctgttgttgtcaacggctccttgctttttgcaagataaatgtttgtttcagtgtgtaaataatatggaggaaacatgttcggatgatggatgttcttgcgcagattgttgttctcctttcctgcattgcaatacttgtacgggatgtccggttccgagactttttcacttacctttcgttctggaaatcccgttgaatgataatctcctttcgttttataaagagaaactgattcctcagttttcttcttccatctggcaaccgcctaagcttattactctttgagataatatttgggggataaaagtctttttactacggagtttttcccctctttgattaattaattatttatagatgaggtttcacacttcatcatagaattgttatctatttatttgtacggaataaatagatagcgtaaaattatcaattacagaaaatgagtataagattagttatgctggcaatatttgtgttgtcagtacaaagtgtagtagcacaaaacatatttaaggcagttgtaaaagacggagatacaaaagaagtgttggttggcgtaaatgctatagtggagaagacaacttacggagcaagttccgatgcgaacgggactattatcatcaaagatattccggatggagttcagcgtataaaattcagttatcttggctatgagacggaaacaaaatcctttacgttccctttagcttccgctacccccgtcgagatcttcctggaacaggacgaggaagcattggaagaagttatcatttcatctacgcgtggaacccggaccattcaaaatataccgaccagagtcgaatttatttccagagaagaacttgatgaaaaggggagcatgaaaccgggagatattcgtatgttattgaatgaaagtacaggtattatcacccagcagacatctgcaacatcaggaaatgccgctatacgtatacaaggattggacggtcgttacacccagatcttaaaggatggatttccggtctttgcaggagcagcaagtggcttgggactgttgcagactcctcctctcgacttgaaacaagtggaaataatcaaaggttccacatcaaccttatatggtggtggggcaatagccggattggtgaaccttatttcaaaaactccggaggaaaagagagagctgagtctacaccttaatggaacatcggggaaaggtttggatgtcagtgggttttatggacagaagtttgagaaagtgggtaccactatctttgctgcatataacagaaactgggcttatgatccgtcaaatacgggatttacggctatcccacaatttgacagatatgtctttaatcctaagttattcctctatttgacggaaaacaccgagatgagtatcgggctcaatacaatgtttgagaaccgcttgggaggagacatcgagtatattaaaggaaagggagatgatgtacattcttattttgaagaaaacaagacgcaaagacattctacccaactgacgttggaacaccgttttaacgagaaacacaggctcgattttaagaatagcgtgacctatttcaaaagagaaataggagtgccgaactatacttttgaaggtacccaactatccagtttcagtgaattatcatatacatatacggaacaaaaaacggaatgggtagccggattaaatctgtggacagataaatttgatgaaaagaaacagtctgattttcagttaagagactataatcagacgattgccggagtgtttgttcagaacaattggaatttgacaaattggttgaatcttgaaaccggtttgaggactgattatgttgccgattatggggtagctgtgcttccgcgtatttctgctcattttaagataacggacaagttctcttcccggcttggtggcggtttcggttataaggcacctacggttttcacggaagacagcgagaaaaggcaataccggaatatgcttcccattgataaagacaagaataaattggaaagaagttatggtttgaattgggattttaattatgtcacttcgtttggcggaggtaatgtaactttcagcgtcaatcagttattcttttatacttatcttgatagtcctcttttgctgcaacctgcaacgggaggaatgtatcagcttaataatatcaaaggtcatacggacagtaaagggggagagacgaatgtaaaaataggatataaagattttcatttatatctgggctatacctatacagatatcgaaacaaaagagaatgctataaaatatgaaaacatattgactcccaaacatcggttgaacagtatcttgatgtatgaagtagaagaccaatggaaaataggattggaagcctattatttcagtccgcagaaactaggtgatggtctgaaaggcaaatcatacgttgtgtgtggcttcatgatagagaagatttgggaaaagctttctttatatgccaactttgaaaactttacggacaggcggcaaacccgttttgatactatttatacgggtagtatatccaaccctgattttcgtgatatttatgcaccgcttgacgggtttgtcatgaatgccggtataaagttgaggttttaagcgataaaagcttttcagattgatttccgtatagaagaaaaacaggaaagatgtacatctgccggtacggtcttgtacttgagtgcatacactcttgtacttgactgttccggcagttgtacaatatagtagtggttgtagtacttctgtttttgattgcttttactctaatttgttccgaaaagtccttatgtagttcgtgtttagcccatcaagatgtgctggaaagcttgtacttttgcaatgaaattaaaaaagatagtttatgactgtaatgaataaagagaactcaaaagtatttttgctgatcctgttgggaatgctgtcggcatttggtccttttgtgacggatatgtatttgcctagtctgccagccatggcagactatttttctacccactcgtcgatggtgcaattgggacttaccaccagtatgataggtctggcattgggacaaatctttttcggaccattgagtgataaatacggcaggcgtccgttgttgctcgtctcgatgatactgttcatcgtgtctaccgtattctgtctttttgcaccggacatttattcgtttatcacattgagattgatacagggaatcggaggggcaggcggtattgtcatatcccgttcggtggctacggataagttttcggggaaggaactggccaagatgctggccgtgatcggcgcgattaatggagtggctcccgtggcagctccggtagtcggagggttggtgaccggggcgatcggatggaaagggatttttgtgatattgctgtttattggcgtactactgtggataggctgcatccgttttaaagaatcacttcccgtagagaaacgctcgaagacgggaatcgtttctactttccgcaacttcggtgcaatcgttcataaccgccgttacatgctctatgtcctgcaactggcgtttgcacaaggcatcctctttgcttacatagcttcctcaccttttattgtgcaacaacattacggattttccccctttgcatttagtatctgcttcgcggtgaatgcggtagctatcggagtggcagcagctatctccgtgaaattccgccaacctgaaaatgggacgctgaccggatgcatcggtatgttgtgcctgtccgtctgtgtgatgattgccttgtataacggatgcggcttctggacctatgaactgctgatgttcgcattacttttcacaatgggactgacctttacttcctccactaccttggcgatggatagcgaacgccgttacgccggagcagcttccgccctgttgggagcactttgttttgcttccggaggtattgtttctccgttggtcggcttgggaaatatccttgtatctaccggagttacatttgtggtctgcgccatctgttccctgctttgtgcactatgggcgatgaggaaagtaccgatgaaagtagcaatgtgccggattttccgttaaagtgagattgtttcaaaaataaggtgtgacataatgaataataaaacgcagattaacgcaaattatcgcagaaataattttataagtcgttgactgatatttcaatataattgaaataatctgcgataatttgcgttaatctgcgtattgacacactttctaatttactaccggtataatcttagtataattactaccagtataaacagaccgaaataaaactagagttttatctcttccgtgaatatctccccgaaacggtttttaaccaccaccttgacagattttgcatctttggaaggctgtgcacggaaaagatgacgtgtgcgataacctgttttctttccctttaccatattgatataatcctgatcctcatcgtcaaaagcctgcatagcacctttcaacactccatcctcgtaccagtttaccgtatacgtccagtcccaatcccagatattggctaccacatagtttttctggctttcaaactctcccggttggtaaagccggaactgatagtccggagaacaccctgttgccttgtaacgccatttcacatcatcacctttcacttgtaccaccagataaccgttcggtgctccgcaacgattcacgtgtcctgcccaccatgcgccgcaagcagccccgatattatgttcgtaaatggtaggagcgggcaactgattttcataaaagtgcgtgtgtccggagaaaatatgtacttggtaaggcctcaacagttggaaaagcgcattggcgttgcgcgcatttccccctgcagctaccgtgttattagctaccggagcgtgaacgttcaggaacacgatatttcctttgggcacataacttaaatcctttctcaaccagtccaaatcttccggcgtgaagcgttccgtgtatttcttgttgccgtcgtagtcaatatccttcattgctatcacatgcactttaccgatattgaatgaatagttggccgggccgaatgactgataataattctgttccccataaccatccgccggatgatccgtctgtgtcatggatttgtagagcaggttgaagtcgtggtttcccatcagttggaacatcgtcattcccaagttggacaccgcttgacggtaaggagcgtacaggttcatggcatcccacaccagatcccccagtcccatgccgacgatttcgaagttctttagtgagtcggcagtctgtttcaggtcgggcactgtttccgtgcggaagcggtccagttgcttttcgtttctcacttgcgggtcggaaatggcgatatagacaaattcatccaccggcttctgccgtttagtcaatacgaagtcacattggttctcgctttttccggcatccagatattgatagaaaccatcggctaccccctctttggaaggaagctcatacgctgccggagtagagatgtaaatcatcggataacgtgccggatcagtgttcagaacatagtttccttctgcatcagtcgtattgaaatgtgccccgtccgtcaccactacaccgctgacgggtttacctgtattatctttcacactccctcttaccaccgtctgaccaaaggcgacaacagcgttcagctggaaaagcaagaccgctgcaaacagcgtatttctaaaattgatctttttcattgcttataactttcttaaagtaacctgattgaataatgcgataatttcttccggttcatctgccgatttgagagcctcctcaaaagacttgctgttatcatcgaaacacatcacattggcacaatccagaatatgacccatgttgaatgtagcaacttcccggctcacctcttctttcttcaatgccttcttataatatttattcaccttattgactgccttgtaaatagaaggcttcaagatttcgaccgaagaatccgtaaatccgattgttacatcatactcatgcgtataattctggatgaaagtattccattttccggtaatgtcacttcccagataatgttccgcttcaaacaccggtttggtagtcgggatttctccatacacgtcgaatataaacgccgctttcggctttttgcctacgggagtagcttctttttcgtttttggaagcattgtcttttccggagatattctcgttcatggcgagctcccctttctgcgccattgctgccatcgttataactaacacaacagccatactgattattcttttcatattcattgaattttaaagattgattgaaatgatgattattgccgaaatcttggtgactgacacattcatttattgctgccacatcagtcgaatatggaagtcatcgcctcccatgttcgttttagccgcctgataattcttcagattggtacgctgcagagcagccggatatttaaagcgtttcggcattttgttattagcatttgcgatgccgggtcccacaggtaacacaggaaaaccggtacggttatattcaaaccactgctgataatcgcagaagaacagtgcgacaaacttctggttcatgattcgttccagcgtatcatcataagcagcttccggattttcaaaataatggtcaggcattttctgtccccactgttcgatagccgcctgcactcccttctgataagcctctttggcagcgttgcttcctccgtcgatcgctccttttttcagtaattccgctttgatgaattccacttcggcataaggcatcatggcaagtttcataggcgctttcgccatttcctgattcagtcccgaagcagtgattgaaggcaacgtctgataaccgctgggcaaacccacataatctttagtctggtcggggagagtaacctgtgttgcatacacctgcagacgaggatcgttccaacctttcagtagattgacaaagaactcggaaatctgaacataagaagtgaaatcctgcggacgggtgagcggagcttcctccggataagttccgctgatggcaagcagggcggcatcatcgttcgattcgaataccggataagtggcgggatcagtcagcatggtacgcagctcttgtttcgcgttgaattccggcacgtcgatcacccggagcagtgcacgcagacggagcgagttgcagaacttcttccatttcaaaataccggttgcatcccctttggacgtcttgtacaacatctcgcccgattggttgtaaatcaacccgttagctttgtcgaacaactcgttggcagttttcagattgtcgataatctgttggtacacctgctgttgggtgtcgaacttcggtgcaagtattccctcgtcggcggagcaggcttcgctcatcggaatatcaccgaaggcatccgtcagaatctggtatagccaacattgcaaagtcagcgatatagcatcgtagttgggttgtttggaggcttccggcaattttccggtgaggcgcatcatctctttggcgttattgatccatttataataagtagtccatgtgccgtctccttcgctgtccgtcatataccaccatcccacaccgttggtactgctggtagatacggcacattgcatcaggtcgtaggtgtagctgttgtagcgtttccagttgtagaccgatgtttcgtataaaatcgggttgagcagagtgccgggattcacctcatccatacgggtggggtctgtattgagttcgtcgaaactggtgcaggaagtcgtgcagagagctccacacaaagtcattccccatactatatttttgaaaagtttactggttttcataagtcagtgtttaaaaagatacgttaatattcagtccgaaagtacgtgccgtaggcagtgagcccgtctccacaccggtcaccatcgaacttccgttgagggcggcagattcggggtcgaacagaggatagtcggtgatacagaacaggttgcgtgcgtagagtgccaccgatgctttgctgaacggtgttttcttcagtgtgctgttcggcaacttgtactccagtctcatttcgcgcaacttgaggaatgaagtgtcgaacgtgttagtttccacattggccatccggtagtattccttataataactttccacggtcaccactttggtgtttggcgagtaagttccgtcatcgttcttcaccgttcccggggcaatcatgtacatcccgtcttgtggtgaaagtccggcggcagcgatgcgtgggtcgtctttcgacatataaaattccgttcccggcagacgcccgttcagcgtatgttgcagttttccctgttccgtcattttgtggtgcgagtgcgagtacatcttacctcccacctgtccgtcaagcaagacgctaagcgtgaagttcttgtaagaaaattcattgtacagtccggctttccatttcggataggccgtgccgacgtattcgatctctcccgaacgttcgggcaatccgttgtcgttgatgaccacatttccttccgggtcgcgtaccagtttatatccccagagatcgcccgtggttccacccacacgtccgatgatagacacactaccgatactgctgattaactggttctcatccgccccttccgccagtgagagaatccggttctcgttcttagaccaggtgaaagtagcgttccagcggaaatccctgctgactactggagtaacgtccaactggatttcgtaaccgcggttgcggacgcatcccgaattgatggtagctttgctgtaacctgtcgtcgggtccatcggagcatccagaatctggtttttggtgcggttataatagaacgtgaaatcgagtccgatacggttgtgaaacatacggaagtcgaatcccgtttcgtaattagtcgaaatctccggtttgaaatcctgattatagagcgtagaagatacgatggccgatccggggaaatcgctcgtgccataatagggcgatgtcttgtaagggtctgtgtcgttgccgacctgtgccagcgaacctctcactttcaacagactgatctgttccggcaacgtgaaccactcgttcatcactgcactgacgctgaccgacggatagaagaaagaacggttgcttttcggcagggtagacgaccagtcattgcgcccggtgacatcgagaaacagtttatccttatacgagaaattggccgtgaaataaagactgttcaacgctttctttttgataaccgtctgcacgttcgggttggaaacaccgtttgccagtttgtatactcccggcgtaatcaatcctaccaccgaggcagccaacatatcgtagctttgttgcatcatgtttccacctgccgaagcgttgacacgcaatccgttggcgaatgaatcatggtaagtaaataaagcatcactgtttaattcataatcgaacacattctgtttcttgaaaaatccgtttccgaaaaccacgtcactgataggacgatgctgttcgcgttggtctgctgacaactggatgccggaccggatcatgaaatcgaatttactgttgatgcgcagattggcagaaacggatgatacattactgtgtttctccgaaggattttcagattcgtacagaatgacatacgggtttccgataaatgaactgtacggttggagctgtttcacattttcctgtccggtacgccacatcggacgcaaccagtcgaggttgacattcggattctggaagataaggaagtaggagatagaattactgttatatcccagtgcaggcgtgttgttgagcttgcggtatgtataactcgacttgaaattgatgcgcagtgccctcgaaatttgctgttgggcggaaatcatggcagtgatacgctggaaacctgtattggggagaatccattcgttcttggtgtgggtgatggacgcccgcacgctgccccggtcggattttccggtcaaggctaccgagttggtcagggtatatcccgtctgaaacaaatctttgcggttgtttttgtacgctacccagggagtggctacagaagcacgatcttgtgtcacagggtcatattggtagaacaacctgttggcgtcgaagcgtgctccgtaggcactactggttccgctggtgcttgcgtaactgccgtcttccgctttcccgtaagagtaatagggctggccttcgtagatagaacctgccggaccgatattactcggcaatccctgtccgaattcatactggtaatcgggccatctcatcacatcgtcaatactgaagttaccgctgtaagacacgccgatacctttgggtgcacccgctcccgatttggtagtcaccataatcacgccattggctgcacgcgtaccgtacaaggctgtcgcactggctccttttaatacttggatgctttcgatatcatccggattgatgtcggagaatccgttaccatagtccacggaaagttcgctgtttgaacctgcaccgtaggcaacacccggattggtcatcggactactcatcggtacaccgtccactaccaccaatgcgtcatttccgttctggttcagcgagacatccccccgcagcgagatacggctcgaattgagcgggccaccggaagagataacactcaatccggctactttaccgttcagtgccgtcgaccagttggtgggcagggcgctcgtaatcatatcccctttcacggtttccgtggcatatcccaatcctttttcttcacgtttaatccccaaggcagtcaccaccacatcattcagttgttgcgactcttctgccagtttaacattcatcgtgttgcctgcatagttcttctgtagcgttttatatcctacataactgaatacaagcaaatccttttgagtcaatgttttcttagtcttcagggagtagtttccatcaatgtcggtcaccgtgccgtctgtcgaatttttcacagctacggtagctccgattaacggttccccaccttcactcgttatttttcctttcactgttgtctgtgcgtatgcagagccacagcacaagagcccaatcgacagagaaagcagccatttgtttcttttcataatcttttaccttgcttcttttaatttattaaatgcaataaagttattcacacctgtgttttgtttcacggtgcaaaggaatacaaggcagattaagatagtattacagatctgttaacaatctgtgttgtgtcgtaaatactaattaaagaatccgagcctgatgatataagagaatattacaggagattattacatggaatacttactctgatattccttcggcgacatcccctcgtgccgtttgaagtacctccccaaatacgactggtcgggaaaactgagccggtcggctatctcctgaatggtcagttcggttgattgaagcaacactttaatctccagaatggcaaagtcgtcaatgatctttttagcggaatcaccagtgacagctttgcagataccagtcagatatttggtagaaatgcacagtttgtcggcatagaagctgacttcccgttgagaggcacaatgctcgtgtacaagcgatacgaaacttttgaagatttcatcctgtcgggtaccaccttctattttatgcttgccgaaatagcggtagcatttatcataaatatctagcataaacgattggagatgattcttggctatctggttccggaaacggttttcacggtcgttatatatcgctgttgtggctcgtatcaatccgttgatggctccggtattttcttgggggagaacgtagcaaggctgttctttgatgaaccggaaaaatataggctcaaaccgcatgcaggcttccatgaacatctcttttggaaatccgaaaaacgaagcggtgaagtcgctgctgcaaccattgatgcggataatggtaccgggaagaagtactacctgtgtgttttctacaatttcataatccttcaaatcgattgtggcgtgtgcccatcccttacggcagaagtaaatggcacctccttccaacttccataaatgatgcatgaccggagacagattttcgtcggttccggcaataaaaggttcgcggagtatagcaaggctggagtttctttctttcatacacatttctcttttcgcggacaaaaataggacttttttactaaatattagcttttatattccgaaaatgaacaaaactcaaaacattatgaccagttttctatactaaaaagagcctatctttgccgcgttcaaaaatttaataggtaacataatgagtagaaagattagtaaagttaagcaagggctgttattgctctgctgtctggttgctgctacgggatgtaagcaagctccacctgcacaaatggaaacaggatatgaagttatgaccgtcgctccggcggatcgtatgattctgagcacatattcggcgacaattcgcggacgccaggatattgatatttatccgcaggtgagcggaacgctgacaaaagtatgtgtgacggaaggacaacgtgtaaaaaacggacagacattgttcattatcgaccaggtgccctacgaagccgcattgcagacggtggtggcaaatgtgaagtctgctgaagctgctcttgctacggcacagcttacttatgaaagcaaagaggaactgtataaggagaatgtggtttccgcattcgatctgagcacggcaaagaattctcttctggcagccaaagcacagctggcacaggcgaaagcacaggaagtaaacgcccgcaataacctttcatatacggtagtgaagagtcccagcgacggtgtgatagctatgttgccttaccgtgtcggagcattggtaggaccgagcattccacaggctttgactacggtttccgacaattcggatatgtacgtttacttttctctgaccgaaaatgaattgctttctttgattaatcagtataaaaacatggacgaagcattgaagaatatgccggaagtagaattaaaactgattgacggttcggtgtatggcgagaaaggacgtgtggagtctatcagcggtgtgatcaaccgtcagacaggaacggtaggtgtccgtgcagtgttccctaatgcttcgggtattttgcacagtggcgcttcgggcagtgtcatggttcccaattcctacaaaggtgttattgttattcctcaggaagctacggtggcaatgcaggataagatttccgtatataaagttgtggacggaaaagcgacttcaacgttgattactgtagctgccatcaatgacggacgcgagtatatcgttctggacgggttgaaagtcggggacgagattgtgtcacaaggtgccggactgcttagagagggaacgcaagtaaaataaagctgtaagatacaaaaaatgaaaggaaatgtatttataaagcgaccggtgatggctatgtccatttccgtgttgattatgattgtcggatttatttcgcttttcaccttgccggtggagcaatatcccgatatagcaccgcctacggtgatggtgtccgccacttatacgggggcagacgctgatgcggtgatgaatagtgtgattatgccattggaggagagtatcaatggtgttgaaaatatgatgtatatcacttctaatgcgaccaattccggtactgccactatccaagtctatttcaagcagggaacagatccggatatggctgcggtcaacgtgcaaaaccgtgtatcgaaggcccaagggctgttgcctgccgaagttaccaagatcggtgtaacgacgagtaaacggcagaccagcttcttgcagattaattcattggtaagtacggacgaccgttacgatgaaactttccttgccaattatctggatattaacgttattccggaaattaaacgtatagagggagtcggtgacgtgatggagttgggagatacttatagtatgcgtatctggctgaaaccggaattgatggcacaatacggattggttccgtcggatgtgacggcaatactgggtgagcagaaccttgaggctcctaccggttctttaggtgcggattctaaaaatgttttccagttcactatgaaatatcgcggtcgtctgaagagtgtggaagaatttcagaacactgtgttgcgtgcagaggatgatggttctacacttcgcttgaaagatgtggccgaggtggaattgggagcgttgtcttacagctttcatggtaagacaaacggacatccgggcgtgacgtttatggccttccaggtggcgggagcaaatgctacttcggtaaacgaagccataacggacaaactgaatgaaatgtcgaaagacctgcctgcgggtacggaatttctttcgatgatgagttctaacgacttcctgttcgcttctattcacaatgtggtggagacattggtcatcgctatcatcttggttatccttgtggtttacttcttcttgcaggatttcaaaagcacactgataccgtctatttccatcattgtctctttggtcggtacgttcgcctgtctgacggcagccggattcagtatcaatattcttacgcttttcgctttggtgcttgccatcggtacggtagttgatgacgctattgtagtggtagaggcagtgcaggcaaagtttgattccggctacacatctccttatcttgccaccaaagatgcgttaagtgatgtgacgatggcggtaatctcttgtacgtgtgtatttatggcggtatttatccctgttacttttatgggcggtacttccggtattttctatacgcagttcggtatcactatggcaacttccgttggcttgtcctgtatttgcgccttgactctttgtccggcattgtgcgctatgatgatgcgtccggcttcgggcactaagagcgcgaaaagtatcaacggacgtgtgcgtgccgcttataatgcttcttacaatgctatgctgggtaaatataagaaaggagtgatgttctttatccaccaccgttggatggtgtggacttctttggtttgctgtatagctttgctcgtttatctgatgtcgacaaccaaaaccggtctggttcctcaggaagatcagggagttatgatggtgaatgtcagtgtggcaccgggtagtacgctggaagagaccaacaaagtaatcgataaagtagaagctgtgataaagagcactccggaggtaaaacaatatactactgtcgccggttacggactgattgccggacagggtgtttcgtacggtacggttattatccgtctgaaggactggagcgaacgtaagggtagcgaacacacggctgatgcggtgatgacacgcctgaacggacaattctatatgattaaagaagcacagattttctgcttccagccgggtatgattccgggctacggtatgggtaactctatcgagctgaaccttcaggataagactggtggggatatgactacattctataacaatgcgatgaagttcctcggtgcgttgaaccagcgtccggaagtggcaatggcatatacttcctacgcaatgaactttccccaactgtcggtagaagtagatccggcgaagtgtaagcgggcaggtatttcgccctctacgatattggatgcactgggtagttactgtggtggtgcttacatatccaactataaccagttcggtaaggtatatcgtgttatgatgcaggcttcaccggagtatcgcttggatgagcacgcactcaagaatatgtatgtccgtaatggtaccgaaatggctcctgtcagccagtttgtgacgatcaagaaagtaatgggagcggaagttgccaatcgcttcaacctgtatagcagtattacagccaacgtgaatccggctgccggatactcatccggtgaggtccagaaagccattaatgaggttgccgaacagaccttgcctatgggatacggatacgagtatggaggaatggcgcgtgaagaggccagcagtggcggtgcaaaaacgctttttgtgtatggtatttgcattgttttgatcttccttattctagcttgtttgtatgaaagcttcctgataccgtttgccgttatcttttccgtaccgttcggcttgatgggatctttcctctttgccaagattttcggtttggagaacaatatttatctccagacgggtgtgattatgttgatcggtttgttagcgaagacggctattctgattacagagtacgcaatcgaacggcgtcgtaaagggatgggaattatcgagtcggcctacagtgcggcgcaagctcgtttgcgccctatcttgatgacagttcttacgatgattttcggtatgttgccgttgatgttctcctccggtgcaggcgctaacggtaactcatcattgggtacaggtgtcgtaggaggtatggctgtgggtacattggcattattgtttgtagtcccggtattttacattgcatttgagttcttgcaggagaaaatccgtaagccgatgtatgaggaggcggaccaacaagtagaattggagaaggaaagaagcttggcggaacgcagtgtgtttaacgaagataaataactcaaatagaaaagtaaagtatgagaaaaattatcatattatccgcagcaacactggtactgagcagttgcggtatttacaataaatacaaaccggtgtcggaagttccggagggactttatggtagtgagccagtcgctgccgtcgatacggcaaacttcggtaacctctcgtggagggaggtttttaccgacccatatttgcagactttgatcgattcggctttggtgcggaatacagatatgcagacggctcacctgcgtgtgaaagaagcggaagcttcactcttgacgtccaaattgtcttatctgcctaccctgtttttggcgcccgaaggggctgtcagcagtttagaccgtgcgaaagccacacagacctattctctgcctgtcacggcttcgtgggagttggatatctttggaaaggtaacgacagccaaacgtcgtgcgaaagctgcctacgaacagagtaaggagtatgaacaggctgtgaaaacacaattggtggctgctatggcaaatgcctattatacattgctaatgcttgattcgcaatatgagattgctgttgctaccgaagcggcttggaaggaaagtgtgaggactacccgtgccatgaaaaatgccggtatggtgactgaagccgggttggcgcagacagaggctacctattataatatatgtacgactgtgcttgatctgaaggagcagatcaatcaggcagagaactcgttggcgttgttattggcggaaactcctcacgagattcagcgtggaaaactgggaaatcagcagttgccggagaacttctcagtaggtgttcctttgcaaatgcttgccaatcgccccgatgttcgtagtgcggaattttcactggctcaggctttctatacaacgaatgcagctcgtgctgctttctatccctctatcactttgagtggtagtgccgggtggacaaacagtgccggtagcatgattatcaatccgggacaattccttgcttctgctttagcatccctgactcagcctttgtttaataaaggactgaatatcgcacaactcaagattgcgaaagcgcaacaggaagaagcacgccttagttttgaacagactttgctgaatgcgggcgtggaggtgaacgaagcattggtacagtatcagacggctcgtgagaaggctgctttctatgataagcaagtagcttccttacagacggcctccaagagtataagtcttttgatgaagcatggcaacaccacttatctggaggtattgactgcacaacaaacgttgcttaatgcacaattgtctcaagttgccaatcgctttaccgaaatccagggtatgattactttatatcaggcgttgggaggaggccggatgtaaggaggttgttattctaaattcttaagtatattcactgtgatgagagggaatctcattgcagtgaatatttttttattctcttttcctatttttctacgaaagtattcagtgaatgaggttgtaaagtgatatttaaatagcggttccctaaattaacggttatatctttcgctttttcgttgaagtttccggctatagccacttgtttcttttgaggagtcataacgacaagtaccggagttttgtcttctttgccggttttataagctaagatttttgaaccgggcgttatgtaatggctgtaatgttgtactgcataatactcaggagcataggttgccgttcctgcttttgaatctacatggattaacgcgttttgtttccatccccatccgctgaaaccaccatcatacaatatagcgttccaaaaagtatattcttcgcaaccattacccagatagtgattcatcaatccgaaggtatgctcggctgctttccaatcgaaagagccccattcgcattcactttctgtttgtacatatttatattgcggatatttggcacggagtttcggtaatatctgtccgccttcccattggaaaccgacgccttgtatcgtttccggcatacgtggatcagaaaggacctgatcaataacatcgtagcggttagtgttgattgttcctaagtataatttaatttccggatgttgtttctttagggtaggagcgagatattctgtgttgaaacggatgataccttctgccgtgcatagtcgttggcattcatggaaaagcgccccattgtgaacctcagctctccttcgggagagaaaagtttgtgatgttccttacggggaagcatattgagtgcatcccatcctaattcgttgaagcaagttacctaagctttgaaaacagtcccttcttccgaaccgctgacatccaatatgggagtttgtgcggcattcgtttgtagcttggctttcgatttttgtcaggtgttaccttccgtactgctgatccattcgagagattgggcatacatggagtttgctgatagtgtgaggactaaactacttaccagagtggttttctttacaatgtttctcatgtcttgattcaaagtgttatttattgttgactggtgacaaaagtaaaaaagaagagaggtatggaggaacaaatatgtaacagatactacgacagatgtaacaaaaaagagcaggtgtcagaataattaaagtcggcaattgctggttttaattctgacacccactcatttttaggttgttaggtatgcttatgcgttcaatgcctgttcaatatccgcgatgatatcatctgcgttttcgattcctacggacagacgaattaggtcaggccgtacacctgcttccatcaactgctcgtccgacaactgacgatgtgtgtggcttgcaggatgaagcacgcaactacgtgcatcggcaacgtgagtgacgatagcaatgaattccagtgaatccataaacttgatggaaacatcgcgtccccctttcaggccgaaggagattactccacaagaaccgttcggcatatatttttgtgccaaagcgtaatatttgttatccggcaggccacagtaattgacccaagccactttctcgttcttggaaaggtattcggctactttctgtgcattgcggcaatgctgtggcatacggaggtgtagtgtttcgagtcccagattcaataagaatgaattttgcgggctttggatgctgcccaagtcacgcatcagttgtgcggtagctttggttatataagcgcctttgccaaatgctttggtgtaagtcagtccgtggtaggattcgtcaggggtacaaaggcccggaaatttatctgcatgagcgtcccagtcgaagttaccgctgtcaattacacaaccgcctacgctggtagcgtgtccgtccatatatttggttgtggagtgaacaacgatgtcggcaccccactcgaacgggcgacagttgatgggggtagggaaagtattatccacaatcaaaggtactccgtgattgtgagcgatacgggcgaatttctcaatatccagcacttcgagagaaggattggaaatagtttcaccgaacaatgcttttgtatttggctggaaggctgcggaaatttcttcttcgctggcgtccggattgacgaaagtaacgtctatgcctagttttttcattgtcacgccgaacaggttgaaagtaccgccgtaaatagcggaagaacaaacaaaatgatctccggcctggcaaatattgaaaatagcataaaagttggctgcctgaccactggaagtcaacatggcggctacaccaccttcgagagcggcaatcttggcggcaacagcgtcatttgtcggattttgcagtcgtgtataaaagtaaccgctatcttccaaatcgaaaaggcgggccatttgttcgctggtatcatatttgaaagttgtactttgatagatgggcaatacgcgtggttcgccctttttaggcgtccaccctgcctgtacgcacagggtttcgggcttgaattgttttgccataatgttatcgggttttagtgatttattccaaaaaatgttttaatgacgcaaaagtagggaaaataattgtatttttgccctgtttatgagtgaaatgatagtcacatgaaggagataattgtgcagatatgaaaaataaactctatattcttttattcttagcttttcttttctcaggaacagcactttgggcgcagcagaaagcgaccccgaaggcgggtgagggtatctctgcttttctattgagacataatcgttctccccgaaaatatatggatgattttatagagctgaataaaaagaaactggggaaaaagaatgtacttaaagtaggggtgagttatattattcctcccaaagagaaatcaaaaaacacaaatttgggaactactattaacgagcctttgtttggtaaggaattggcaaatgtcaaggttacttccaatcgtcttgccggtgcttgtttctatgtggtcagcggacatggcggtcccgatcccggagctatcggacgggcaggaaggcatgagcttcacgaagacgaatatgcatatgatattgctcttcgtctggcgcgtgttctgatgcaggaaggtgctgatgtgcgtattatcattcaggacgctaaggatggaattcgtgatgaatcgtatctgtccaacagtaagcgcgaaacttgtatgggggatccaattccattgaatcaggtacaacgtcttcagcagcgttgcaataagatcaacgctttatatcagaaagaccgtaaaaactatgcctattgcagggctatctttatccatgtggatagtcgaagcaagggaaagcaaactgatgtctttttctatcattcgaacaagaaagcgcatagcaaacggttggcgaataatatgaaagatacatttgaatcgaaatatgataagcatcagcccaaccggggcttttccggcactgtgagtggccgtaatctgtatgtgctctcccgtaccactcccgtttctgtatttgtggagttgggcaatattcaaaatactttcgatcaacgccgattagtgataaattctaaccgacaggcattggctaaatggctgatggagggctttttaaaggattataaagagaaaaaataagtagaagagtctgttttttatgaacaaaacatataactgtttgttttaataatgcaaatcacctgataaagcttcttatgggtatgcgaatatagataagtcaagcaagatatgcctccccggcataacaggaagattgcatagtagttttgtcgtgttttattttgtgtttgtgttgtgacggtgctgcgatgtgaatcggagtaccgttttttagtaatgtccggttgtgttccctcatttttttgatttctcatgaacaaaacatataactgtttgttataataatgcgaatcacctgataaagcttcttatgggtatgtgaatatagataagtcaagcaagatatgcctccccggcataacaggaagattgcatagtagttttgtcgtgttttattttgtgtttgtgttgtgacggtgctgcgatgtgaatcgaggtgccgttttttggtattggtcggaaagaacctttcgggaataaaaaaacggacttacgaaagtcctgatatgatagtcagatattccgtaagtccgttgggctggtgctgccttgcagcaccttatctagttgttataagggcatattaccgtgtttcttaggcggatttgtctgcatcttattttctgtcatctccagtgcctgaatcagacgcttacgagtctgtctcggataaatgatttcgtcaatatatcccaattcggcagcttgataaggagttgcgaatttttctttgtaagcttccagctctttagctttcgttgcctcgtcagccttacggaacaagatattgatagcaccgtctgctcccatcactgcgatttcggcacttggataagcgaagtttacatcggctcctgtttgtttagagttcatgacgatgtaagcgccaccgtaggctttgcgggtaatgacggtgagtttgggaacggtagcttccgcaaatgcataaacgatttttgctccgtgacggataatgccgttattttcctgtgtatatcccggaaggaatcccggaacatcttcaaaggtaattaatgggatattgaaacaatcgcagaaacggatgaagcgacttgctttgtcactggcgtcaatatcaagtactccggcaaggtaggcgggttggttggcgacaatgcctaccgaacgtcctgccagacgagcaaaaccgataatgatatttttggcgaagttcggcatgacttcaaagaaataaccgttgtctaccactcgctcgataatatctttcatatcatacggaacattcggatctgtggggacaatggtatccaaagtggtgtcttcacgatttatttcatctgtacagttctgttttttggtctcgtccatattgttctgaggcaagaacgaaagcagctcacgtatgctcatcagtagctcttcttccgtgttgcatatgaaatgagtaacaccgctcttacagctatgtgccatagcaccacctagttcttctttgctcacttcctcatgaatgacggttttcacaacatcgggaccagtcacgaacatatggctttgttcttttaccataaatataaagtcggtaagagcaggagagtagcaggcgcctccggcacaagggccgagaatagctgaaatctgcggaatcacaccgctcgccattgtgttctgatagaagatgtccgcatagccggaaaggctctcgatgccttcctggatgcgtgcgccgcctgaatcgttcagggcgataatcggagcgccgttcttcaaggcaagttgttggacttttacaattttttttgcgttggaagccgatagagaaccaccgtaaacggtgaagtcataggcataaacgaacacctgacgtccgtctatctttccataacctgacacgataccgtctcccggaattttattcttgtccatgccgtagttagtgcaacggtgaaccatcagtttgtccagttccacaaatgtacctttgtccaacagcatatcaatacgttcgcgggcagtcatcttcccgctttcgtgttgtttctctattttggcagtgcctccaccgagtgaagcgatgcggtcacgttcttcaaacgtggcatatgctttatttttttcttccattttttaatcaattgtttcaagagttattaatgtctggtcaccggtgatgttatctccttcccggaccagtatttctttgatgcggcagtcggaagttaccttgtagttgctctgcatcttcatggcttcgataacgataaccgtatctccggctttcatttcctgacctactgtcacggggatttttactactttgcccggcattggggaagtaatactgtcgttttgttctgcttcccctttcttgcgcatgcgcaggtatttcgcttgactgtctacgatttcgacattaaaactgctataatgagtgtttactttatagcttttcccgttttcacgtcgaattaattgggcatttgcactgcggccatccatcagaatgttgcaggttccattttccgccatcacaacatcagcctcgaaaggcttcccgtcaatggtgagtaccactttgttatcttctttgctgaccaattctatttcggccacacggtctcctatatgaatttccataatcgaattctctgcgttataatttagattcttaatacacctttgtgtaacccgaattccttccatttactgataggacggttatccgttgcatcacctttgttctcttcgagattcatcaggtaatctatgtatgcggcaatcatggcaatgttttcagcacgttcgctggtgcgcatgatacattgtttcaagtgttcgccattcttggcaatgaatcctgtgtcgtagtgcccttccacaaaatcgggagtgtccatgatggcacgcagataactgatgttgttcttcactccggtgagcttgtattcgtggagcacgcggcgcatgcgttcgatggcataatcgcggttggtggcccatacgatcagtttgccgatcatcgggtcgtaatagatgggtatctcgtatccttcgtacacgtagctgtcaatgcgcacaccgataccgttcggctccgtaatctgtttgataattccgggacttggcatgaagttcatttcagtgtcttcggcacaaatacggcattcgatggcgtgtccgcgttgtttgatatcttcctgtttcagctggagtacttggttgtccgccactttgatctgttctttcacaaggtctacacctactacttcttccgtaatcggatgctccacctgtaaacgggtgttcatctcaaggaaataatagttgcggtgtttgtcaacaagaaattcgatagtacccgcaccgatgtagttcaccgctttagccgcagctaccgccttttcacccatatctttccgtagttcgggagtgacgaaaaccgaaggagtctcttctacgattttctggttacggcgttgcacggaacattcgcgttcgcatagatgaatgacatttccatgcttgtcaccaagaatctggaactcgatgtgatgaggctcttcaacgaacttctccagataaaccgtgtcgtcaccaaaggaagacaacgattcgctcttggcagtggtataagcttcttctacttcttcggcattgtggatgaggcgcataccctttccgccaccgcccatagaagctttcagcatcaccggatagccgattttattgcaaagctctatggcttcttccacgcttttcaggttgtcttgtgtgccgggaacaacgggtactcccgcctcgatcattttgatacgggcagcaattttatcccccatggcttccattgtttccggattaggtccgataaagatgattccttcttcctgacatcgacgggcgaaggtagcattctcggacaagaagccgtaacccggatggatggcgtccgcatgagctgctttcgccacttcgatgattttttctatattcagataactctctttggatgctgccggccctacgcaataagcttcgtctgcataaagcacatgcttcgcggtccgatctgcttcggagaagatagcgatactcgttatctccatctcccggcaggagcgcatcacccttacggcaatttcaccgcgattggctactaagattttttttatcatacttttttcaattaagtacatacttattaatgtcttcccatctaatggacatactccacccgacgaaaaacagtatttttttgatttggggcttaacaagtgatgctctttctcctaacccacgaggaggggagcgtcttacacaaaatggcaggtcttctgactgactcttgtcttatttgccttcccgattaacatcagtggcgttaaattagttcaattataagacattgaacagagcttcacagcagcgggactgtccgggacttacacccgattccctattaatcgtcgtccgttggatacggattctgaaccatttcggggggcaaagataaataaatattaaataagatgttccttttttgcacgaaagtttcatttttgtgcaatgcttatctttaaataaggattctttaattagtgtataaccttgctacttttctaaactatatttctcctgatattgttaggttgatagtaattaattaaaaggagatattcgtatgaaagaaaagaaaatagctcgtgaagaaagaaatcaggagaaactggctaacggtgattgggtaatggcagagttttatgcaacgtggtgtcctcattgccaacgtatgaaaccggttgttgaagaatttaagaaactgatggaaggaacattggaagtggtattggtagacatcgatcaggaaccagcccttacagatttctatacagttgagtcgactcctacctttattctttttagaaaaggacaacagctctggagacaatccggcgaattacctttggaaagattggaaagagcagtgaaaggattcaaatcctgacgattattgcatagtttgttacaatgatatgcgtagctgattctatgctggtatgtctttgtctggcatacttctaatatgcataaagaaaagcagaaagtattctccggtgaggtacttcctgcttttctttatttttattgctttctgttgagtcgtaactcatacaggcaagcctgtacctcttcaaggctgccggtatgttttccttcatcatcagacagtttgatacattccctccattcctgattgacattcatcttacattgtgtcagtttcatcacgatgttcgaaggttcgaacccggtatcgttggtgagattggtaccgatcccgaaagagcagcggattttgtttttgcagtattcttgaatatccaatgcttttgtaaagtctagggcattgctgaatacgatggttttggttgtcgtgtcgattcccaactctttgtagcgggcaaccagcttatcgataaactcaaattcattgccggaatcacaccgcactccatcgaaaagtttggcttgtttacggctaaggttgctaaggaagatgccggaagtatatgtatcggaaagtgcgatacctaaatcaccgtcataaacattcacccagttttcgagtgccatatagttggcatgtttatatccgaactgtgctccatgaaacataaaccattcatgtggatgagttcccatcattttcattccatatttcattgcaaagttacagttggaagttccggtgcaatattgcgctgtttcgttcagcttcttgataaccgtttcctgcacatcaatggagaatcttctccgtgtgccgaactctgaaaagcgaagctgatgttgattcgacaattctattttctccgacagcttgcaaagaatctcgttcatgtctgctacattgccaaagaagcggtttttgatttcggagacaatagcgagcaaaggcacttcgtataaagtcactttataaagcaagtcagtcacttcgatgtggagatgacaagcttcatccagatgaatgtcaatcttattcggatcgaaacgaaaagaagacaaccactcccagtagactttcggaaggaatctgcagtttttcgtcatgtattccaattcctcttccgtgaacctcaattgactaaggttcttgatctctgccttgagtgccttcaggaaatctttggtatattgagtctcattccggtcgttgaaactaaacgtgcccattgcatagggaaacagtttgatataagcatacgatgtggtaaacttataaagatctgtatctaatagtgtcttaacaatcatgacattcgttctttattctaatttccatacgttttagttggtcacaaagatatgtttcctatcggtaacatcaaggaaaaagagattattttttgtaatggttaccggttaataatctgtcatctttaccgataatacgttatccggtcgttttatgataacgccactgtcggattatgaacggtcagtccgccatccaccacaatcgtttgtccagtgatgtatctggcatcgttcgaagccagaaaagcgatggtagctgcaacatcctccggttctcccagataaggagtggcacattgaccgaggaagatattacgtacatcctcattcaggttgtccaatgcagtgggagtaagtatcagtcccggagctacggcgttgcaacggatgtttttctttcccatttgagtagcgatatatttcgtcaggttgatgacacccgctttgctggcgccgtataaagtaccgttggcatcagccgtaagtccgcttatggaagctacgttgacaatgttcccgccaccattggcagtcatgataggaatgacctgttgggaaagatacatcgtgcagcagagattcagatggaatgcttcgtcaaagtagttgatgtccagcttttcgatgctaaggtcacgtttgggatcagttcctcctacattattaatcagtacgtctattctttgatattcattcatggaaaaatcaatcaactctttgcaactctggagttcggtggcggagaaatagacatgacgcacgtcagcccttgcgtgcgtgagttcgttggcaagctgctccgctcttttctcggaatggtcagcgatgactactttgcctccttcggagacaatgcggcgtgtggttgcttcgccgataccaccggcggcaccggtgatgacaactactttattttcgaatctgttcatataatgggaatttgatggttaccttttattagaaacagctggcagaggaatttgttagccctcataaactctctttaataagataaggtgttcgattcgaaaacttttgcatcttttccagttttacgctctgattatttaagaaaactgttaaatgttaatgcctggactctcatctgttaatacagctctgattctattaaaccatgttataaggtacgctgctttggccttaaaatttggagataaccggaaagtccgtatctttgtactgtgtttttcatagtattagatttaaggttaacaaaagattggctgtctgggaagatagcctttttttatgcctgtaagtcaactgcagaccgaagagattaaatggatcagtccgaaaaatcggtttgagctctatacggtgtgggaaggagccaaatactatttttatttctttttctgcctaatcagattagccgcgttacttattctttttgcgtatgactatagtattccgcaagaataactatagtctcccttgcgtataactatagtcatacgcaaagtacactatagttatacgaagtaaaagtaacgaatgaaatgagtctaaatagtgaatcgattataaaagaatgcccatagaaatcaataggaataggaaggctatcattgtttaattcaaaacctagtacgaaaaagaaacaaacagaaaacaaccagagtttcggattgattcatcaaaacaacgaatattggttatcccgcaggcttttcacctcccgttcctttacgatatcatcttcggattattcttacttacccaagaagtaacttgtgtgaatgaatatgttaaatgttaacgtgcaaagtctgaaatgttaatacgcttcccggattattaaaccctgttataatatgggctgtttaggctctaaaatttgctatttacctgaaatatggtacctttgtacagtgtttttttcataagtattagatttaaggttaacaaaagattggttgctcgtgatgagtagccattttttgtttttatacactatgattgtttattccttaatcatagtcaacagcatcttaaatctctccactacacttttcgaatatgcattgtttgtctataacaaaaaacgatttttattgttatagtacgaaagactcaataaactaaccattattatgaagaagaatatcttattgtttggagcactgataggtgctttcttattggtttcctgttcgggaggaaacaagaaacaggctgcgtcctccgtcactccggaggaattggataatgccagtaaagtgataaactattatcatacatcgctcatcgtgttgaggcatatagctaatgcaaaagacgtaaatgcggtcttgggatatatggaacagacaggaaaagttcctgaagtatctccgatagcaccgcctgaagtatctgccagagacactgcggaattgatggatccgggagattactttaatatacaagtccgtcagaatctgaagcagagttatagaggacttttcagtgcacgggcgcaattctatgataattttaataagtttctctcttacaagcaggccaaagagacagccaaggctggcaagctcttggatgaaaactatcggctaagtgtagaaatgtccgaatataaacaagtgatttttgatattctaagccctctcacggaacaggctgaaaaagatcttcttgccgacgaaccgttgaaagatcaaatcatggctatgcgtaagatgtccggcactgtgcaaagcataatgaatctttattcccgcaaacatgtactggagggtgctcgcattgatgtgaagatggcagaattgaagaaagaactcgaagctgcaaagaaacttcctactgtcacaggctatgatgaagagcaaaagaattattatagcttcctgtcttctgtggaatcgtttatgaaagatatgcagaaagcaagagataaaggcgcatattccgatgcagattacaatgcgatgtcggaagcctacgaatatggactttccgttatctaaagaattcttcctctgtttgaatgagttgcaatcatgtttcttcaagcaggggatgcttttttaattaagtaaagaagtcctttttttactatccccttttaaacaggagttttacttttgcatttggattaagaaataatatctttgttatatgcaatcatttcaactgataaaaccctgttttgcactggctccctatatacggcattactggatattgcaagacgactcaatagctcctgtctccgaacggactctgcctattggctgcatgcaactggtattccataaagggaaacaacttcttttgttgggcgagtcggagctgcaaccccaatcctttatttccggacaatcggtcggtttctcggatgtgatgtctacaggcaggatagagatgattactgttgtttttcaaccttatgcggtaaaagcattgtttcatatacccagtcatttgttccatgggcagactgtagataccgatgcgatggaagatgtagaactgtcggatttagtgaaacaggtcacggatacttctgataatgcagtttgtattcggttgatagaacagttttttcttcgtcgtttatacactcttcctgagtataatctcaagcggatgtctgctgtctttcatgaaataaacctccggccgcaaatcaatatttctcatttgtcggaaacagcctgtttgagcagtaagcagtttgggcgtatcttcgccgattatgtcggcactactcccaaggaatttattcgtattatccgtatgcaacgggcgttatccatgctgcaacaggatgctacgattccttttgtacaagtggcttatgaatgtggcttttccgatcagtctcacatgataaaggaattcaaactcttttccggttatacccctgctgagtatctttctgtatgcgccccttattccgattatttctctgaactctaaagatgtctctttttttctatcgggcttcctcgtgttaccctacttttgcaatgtctttgcaaaggcttagtagtaaccataaaaaagaaacgagatgaaaaaattaattgcattttttgagattcctgctaccgatttccgtcgggctgtcgatttttacgaaactgtgttgggtgtgcaacttccgacttttgaatgtgaaacagagaaaatggcttgtttcacggaagaaggtgaaaccgtcggtgctatttcttatgcttcaaatttcgactttcttccttcaacgcatggcgtacttatccatttcaactgtgaggatattgaacaaacgttggaaaaagtgcttctgaaaggagggaaagttgtcattcccaaaacaaagattgaggcagacgataaaggatggtttgccatattcacggatagtgaaggaaacaggattggcgtctatgctgaaaaataacaggtagggaagagggaacagcctgtctggaagtgactgctgttccttcgtccccttatccggattattctaccggaatatagatctccgtcaacaactcttcggggggagtgtcacatggattgttcagatagcgttcagcactggcttcatcacgtatcgtacattccatttcgggcagatactttccgtaaatcgtatcgtacacagcttgcagattgtcatacgggcctttataaaggaaaatagcataacgtccggctgggataaccttgaatcccacatcacttttgggggcaacctttacaggcattaccatgcatacgtctgtacgcagtttctcggctggcgtcactttcggatcatcgtggtagatgcaaagcgggctgaaatctcccatcggcagtttttgttctttgatgaattggaataaacggccccaagtgccaccgtaatcattcagtttgtagtcgcctgtaaggcggatataaatcacattccgttcggagacatttctgatctctttttttagttccaggtctggcctgataatcgctggtttcataattacaaagtttttattgtttctatattctaaaggtgaaatgccataaaattgcttgaacactttcgataatgaagaaggggatgcgtaaccaatccggtaggcgatgtcagcaatcggaatatccgagtagcggagtaggcgtgcggcagcttctgtccgcgtccggacaataaacgtaccaatcggttcaccgagaaaagctttcatgatccggtgaaagtaaaaaggagaaaagtttgaaattctggccagagattttaaatcaatatcttctcctaaatgttggatgatgtattccactacaacatttacgcacttttgatattcctctttcgttgtttttttctgttgcataactaatttgggtatttcacttcgcaaaggtattggtaaaaaaacgaaatgacttgtccgatattgcggaaatgtcaactttctattttctttctatggttgccctatacctgttttgagaatttattttgatatataatgtaccttacagtggtgttatggtgtgaaccatggccaaatttttaaccgttaattgcgaatttgattttcttgttttaaataatgtcaaaaactaaaatgaaaaagctggttttgttataaactattattgaaaatgattatattgtaaccgaattattaataaaaatagccatggataaaacaattgtagggaacaatgccggaaaggtctggtatgccctgaaagaaattggtgaaatttcaatacctgaattggcgagaagattaaacctaagcgtagaaagtacagcattggctgccggttggttggcacgagagaacaaaatttgtatccaacggaaaaatggattaattgctttatctgatgaaagcacttttcccttcagttttggataatagtaggttttgtgagtgaatatttttgaagttccgttaacttataagtaagaatatgtccgtataaggtatcacaagttaagtttgaacttaagaagttttatatttaaaagagttgctcaataatagggcaactctttgtataatgaatgtataaaaatgtctgtttattatgtgtgatagataaaatatatatactttttccttcgaattataattgcttaatagattaagaagaaatttatgggtaaatttttgcttatattgggacggggagtggggcaggtgatgtttcagaataatgcactgtcggggggattgatgttagttggtgttttgctaaactcctggcagatggctttattagctgtagctggtaatatagtaggtacattgacagcttacttgttcggttatagtcgcgaagatattgaaaatggtttgtatgggttcaatgggacgctggtggggattgcgataggggtatttatgtcgataactttgccttccttgctattattgattgttgtttcttgcctatccacgtggattgtacggctttttagtttgcaacgttttatctccggatttacggctccttttattctgtctgtatggatattactgtttgtctgttcttgctggtttccttctttactattgaaatccgaaaatactgcgggaacgcaagcattcgctttcttacagtcgtttagcctgaatattggacaagtgatgttccaaggtggcgctgtattgacaggtctgttttttcttttaggtattttggttaattctcgtgtgaatgctgtctatacggtgttgggagcattgttgcctattcctgtagctctgttggcaggagtcgaatctgcggtattgaatgcagggctaatgggatataatggtgtgttatgcgctatcgctttgggagacaagacatggagcgggggagtatatgccgtattctccgtgttattatctgtttttcttcaacttttgggaatggatgtcggaattactacactgactgctccgtttgttttttccgtatggattacggtaggaatacggtatatgttgcttaccctgtttcctgctaagcggaaagttgcctgaaaaattgttgtgataataaacggatgactttgtttttgtcggtagtatggactgatatagtcaaacagtggtcattactgccataagcgattagggatatgggaatatctttgattgtttctataatactgctttctatctgtttgtgtttccaatgaagggagcctataacatgtattacggacatattctcatcggtagtcatttttacatatttgtgtagttctctctgaatgatgcgcaatgtgtcacggctggcggctaggatcatgggaacggatacattggatgaggccatagaaataattttgattttatatttgcctataacttccagtagtttacccatcagtaaatagtcggggagcacattcaatgaggtaaaacgaacgagggtgaccgaatcttgtacaagtatcgcttttatattgtttttcgtatcatgggaagaaatatatagcttttcggttgccgtatcattggtatctatcaggcggatggctatatctgaatgtgctgcaagagtgatacaatctgcataaagtaaatatgcaccattatttatcagttgttcggcttctgcataagtcagagagtgttgttcgcgctggttatttagatttgcacagatatgattgatttctgttgataagaggacttcatttgcattaaagaccgtagccaatatgatagtgtaataatcattgtattttttgttaacaaaatctatttcaccatatacgttctggcataaggagagaggagctatgaatatttcagtatcctgattttgctctatatatggtcggatattttcctggatatagggaatgtcaggctttcgttcaagattgagttgcataaatatgctggtgtcgagtaacttggcatttataccttgttcacgtaggcaataagtaaataaatggctaaatagtcggtatatttcagcttttattattttatctataagtaaatcagcttttccttccactaagttgtggatattattacagtatttttggataagtacatttatgtctttgttaagtttattacttgtgataagatgatctgctaatgtatagtaatattcttctattgtattgataatagaatgtgaagtttcgtcttcatggtgaaaccagctggcagaaattttttgtagccatttctgtagaggtattgctgttggaattactactacatgaggatgttcgtttcggatacaatcaataatccgtattatctcttcctcgttctttattttttcaaatttacaaactttcatcgttatctggtattttattggttgctaatcttttttcaaaatggaatgcttttttcaaaatagaaagcttctattgagctttttagtagttactttgaatattgcaaatatttaaaaataagattgttaatcacgatctcgttattgggaaagttgttccttcctatggttaatatgccaatattataccataatctaaaagatatgtcagttttatatttggagtgaaaatagaattagaatatgtatttttgcatctttaatgattgatacctttttttgaaatgactgaagatataaagaacaagctattgatgtgtgcggaaatttatcattgtgccggttttatagaaagtgatccggtgcagttccctcatcgttacacactgaaacaggacattgaaattagcggtctgctgacggcaataatgagttttggtaatcgtaagcagatacggaagaaagcagaggagttacatggattaatgggagattcgccttaccgatatgtattatcatgccgttggaaggacgatttccctgcgggagcgaagaatagtttttatcgaatgctgtcatatgatgatttttatggatattttcagcgtttgtatacagcttactcctgctttgacagtttagaggaagctttaaatgtgtataccggaataccgatggaaaagttatgtgcttttcttgaggtttctgcaaaaagtccacagaaaaaactgaatatgtttttgcgttggatgattcgtcgggattcggaagttgattttgggatctgggatagtttcgaccagaaagatctgatcgttcctttagatacacatgtttgccgggtagctcattatttaaatttgacggattcggaaactttctctttgaagaatgcccgtcagattactgttgctttggcagaggtgtttcctgatgatccttgtttgggggattttgcattgtttgggttaggagtaaatggggaaatataaatcagtcggtaatgtaaaaatcgattataacagaaaaagtaagggtttaggtacttacctttcagttataatcgaagaaagaaatattagaacgttcttattttgtctttaaattcttcccatccatttgccgatttatatttttccgctgtcccggaaggaacacgaatggttgctatgtttttaggaaatccgtaccataccttttcaaatacttgtggtggagttgttgcttctactttcacttcctgaatacctgtattatcgaatgctgagaaatcgatttggatgacattcgaaggaatggtcagatgagtcactttttggttgccaccgagtagcccttggcctaatatccggatgctttgtggaatttcaaagcgagttaattgtggacatccttcaaaacagcatgctttgattatggcgtcaggggtgtcactgacaacagatccgtaagttagtacttctgttaattccgggcaatggtagaaagctctgccttctaaagttataattccgtttggtaattttgctattgtaataccactctcacgaaaagcttctatcccgattatctttacattttcagggatttcaattgttctcagctttgaagttccaagaaacgcttgtgctccgatttcctttagtgttagaggcagtttaatttcttcaataccagagaaaaagaatgtgctggcaggaagtgtggtgatctttgtctgacttaggtctacactcttcaagttcttacaatagtaaaatatgtctgcttcaagtttttctaaagttgaaggaaaaacgatttcttgaatgcttgaattgaagaaagcttcttctccgatagccacaagtccttcattgagtattactttacttatttttctaccataaaacacttttttcgcaattgattttacatgattgggcaatgtgattgtttcataaccgttcactacttccgttaatacaccattttctatacgtataggggctatttgcacagtaaatgtcttttgcttcccctctatggtaactgtaacctcttgtttttcaacgggagttgaagaggaaaagccgctgatttgttccaaagttacatttacaggtcgtcgttgaccgtcatcgtaattgcctatcactttaattccggttaaatcaatcttttcacctagcgtatagatcgttttttcgggaagctgttctattgagaaactttcgagcaaagcctccgatatatcggatgattgcccaatggatggtgaattgtttttatattcatcactttcttttccgcatgctaccataaaaagcatgagatttaataacataacaatctttttcataatttttttcttttacaagttttccgcttgcaaaagtagcgagattttaccttttcagagttacaatgcagtctcgcatttctaacactcttgattggtaaactctgatattcagtcgtttgtaggaatggatgcttgaattttctaacactagcctaacgactattcaaaaagtgatagaaacaggtctttgttggctgtttccgcagattttatgcgtgactttagacgtgatttgcgggcgtagacattggctactgtatctttcataaacagactgataacttgtggtgagaagccgacaaagatgtaacaaagtaaccgtatgtctgtttccttcattgcaggaaaatcattccgtagtttttgcatggcattatcatggcaggtattaacaattagttctagttcttgcaacatttctccgttttctgaaaagtcagtgatgatttgttttacttcttggaacatggcagcttgctgtgacgaagtgttctcccgctcatagtaggtcttgcctagtttatcgatgatgttgaaacgggaggcgatcaatcctttcaagtgattttcggtattgcgctgtccctccatgcgttctgtcaaagctttatattcggaattagcttcttctaccaatagtagatagcgatctgtgcgttcacgttgtagacgcatacgttgtcggattatgtaccaagctatacctgacaacagaatgactataattatggatgaaatctctagaatagtacgatttttcatgcgatattccgcgaaagccgattgttcctggaaatactctcgttcgaccataccggcagaaaattgcatattcgagcgcgtcagggaatcagtcagatatatgtagcggtgtatattttctgttgctttttcaaagtttttggattgagcttcgatccgataagcagtatagtataaatttgccatgtcacgaatgtcggttgtatgtgtttctgccagttttagataatgacgtgcactgtccatgtgattctttaggagttgcacatcaaccagtgtatgataaccgtataatgtatcttttcgtgcggaaagttcaattcgtagcaataggtcatgaggtatttgtttctttccggatattacatagagagaagctaggttggtcagactggatttggccagtttatcacttttttgctcatcagccaaatcaagtgcggaggagtagagtcgtattgctttttcaacatcctttgagtgataagtagcagcagccatatcaagtgtagcttctgtttcttcacgtagattttcggattgacggaagttattccgagattcccggaaataatgataagcccggttatagttcatctgtgcataatatacttcaccgatctggctatataagagtcctttataatagggctcattagtatctttcaactttttctcaatctctagaaaaaggcgtagtgctccagctttatcatttgcacgtaatttgatacgtccccaataatagagagttgtgcattggttacgcaaatctttcggatgatgcttatagtaattccaagcttttcggataagggagtcacttgttattttgatatggttctgatccaaagcggcagaataaagtaaagcgtatttggcctgttccgcttgttggcttcccggtgtaaattgctgtaatatactcaaagcactgtccggcttattttgcaacaaagcttccgcttcattaaggagggaattttgctctctgttatagcatcctgtaaaagagaaaattatcaatattttaagtattatcttacttttcattctgtaaattgtagtttaggggatcataatatttaccaatttatctcctttattcccttgctctgtaagaaagcgttcgctttgctaaaatgtttgcagccaaagaaaccatattccgctgaacggggagatggatgaacagttgtcaatactagatgcttgttggtatctatcaaggatcgtttctcttttgcgtaacttccccaaagcatgaaaactagattttctcgtttatcacttaactttctgataactgcgtctgtgaatatttcccatcccatatttcggtgtgaacctgtttcgtgtgcacgtacggtaagaacggaattcatgggaaataccccttgtgttacccaacggtccaaattgccggaggtagggattggctttcccaagtcttgatttatttctttaaaaatattggctaatgatccgggaatggttactccatccggaacggaaaagcagattccataatattgtcccggattggggtatggatcttgtccaagaataacgactttgactttctcgaaagggcaggaattgaatacatggaatatttgatgtccgagaggaaggatatgtgcccgttcatattcacttttgacgaatgcaaccagcttttcaaagtatggtttgttgaattcttcctgtaattgttgtctccaactttcttctattttgacattcattggtcactgaaaaattgtacaatgacaaaggtaggcatattgtgataaaatatcaagaataaggttatggcatttctccatttgacaccaattgcgtgctaataaatgataataaacgtctttcttataaaaaagaatggatgtaaacgtacttatttaatttattgcattacctttgtacgcagagtttgagttacgaattgttatcgtatagttcttcttttaatataatgttagtaagtagtcctcttctttaattatcctcctcactccaatttagtatttattttaataaaagtttttagatgaacatttacattgcaggtttaagttatcgcacaaatgatgcggacttgacaaatttatttgcagagtttggagaagtttcttcagctaaagttattatggatagagaaactggtaactccagaggattcgctttcgtggaaatgacaagtgatgaagaagggcaaaaagcaatagacgaattaaacggcgttgaatacgaccaaaaggttatttcggtaagcgttgcacgtcctcgcgctgaaaaaccgtcatacggtggaagccgcggaggttatagtaactccagaagatattaatatctagactttaggaaagcggaagaatttatatttcttctgctttctataaagtctttgtatccgcctttatgatttatctgcggaggcttttataaaaacggatagccggaaaagaaaatcatctaacaattaagttctgctaattctcactcctccgtgtagtgcaataaggatatcctaaatcctgatcttttcatgtctaaagaagaattattaggctttactacaaattttaaaaaattctatttatgacatttagagatttaaatataatcgaaccgattttaaaagcaattgaagaaaaaggatatattgctccaacatctattcaggaaaaagcaattcctgccgcattggcgaaaagagatatattaggttgtgcacaaacaggaacaggaaagaccgcttcgtttgcaattcctattattcagcatttgcaggcaaataaagagacagataaacgtcagggtatcaaagcactgatattaacgcctacccgtgagcttgctatgcaaatcagtgagtgcattgatgattattcaaaatatacccgtgtgcgtcacggagttatttttggtggtgtgaatcaacgtccgcaggttgatatgttgcgcaaaggaattgatattttagtggcaactccgggccgcttgcttgatttgataaatcaagggcatatccatctgactaatatagaatattttgtgcttgatgaggcagatcgtatgctcgatatgggttttatacatgatatcaagcgaatattgccgaaacttccgaaagaaaagcaaacgctgtttttttcagcaacaatgccggatagtattattgctttgacaaagtcgttattgaaaaatccggtgaagatttatataacaccgaagtcatcaacagtagattcaatcaagcaaattatttattttgtggagaagaaggaaaaaagccagctattaatttcgattctgcaaaaggcggaagaccggtcagtgctcatcttttcacgaacaaagcataatgctgataaaattgttagaatattaggtaaggcagggattggaagtcaggctattcacggaaacaaaagccaagcagcgagacagtctgcattggggaactttaaatcggggaagacgaaagtaatggtggctaccgatattgcttccagaggaattgatattaatgaattgccgttggttattaattatgatcttcctgatgttcccgaaacttatgtacatcgtattggtcgtacgggaagagctggaaatgaaggtacagcacttacgttttgctcgcaggaagaacggaaattggttaatgacattcaaaaattgacaggaaagaaactgaataaagctgattttgctatttgaaatcagcgaattataatcctttaaaatataaatattaaattaaatatagattctatggcaaaatccatgacagttggtaaacgtgaaaatgaaaagaaaagactcgctaaacgggaagaaaaactcaagaagaaagaaagcagaaaattatcaggtaccagtagtttcgatgatatgattgcttatgtagacgagaatggaatgataacttcaattccgcccactgatgatattaaaaaggaggagattaatccggatgaaataatcatagcaactccaaagaaagaggaaacagaaccggtaattttgaaaggtcgagttgaattctttaatgaatcgagaggctttggctttataaaggacctttcaggagttgataagtacttttttcacgtgaacaatgctgcaccaggtattgccgaaaatgatattgtgacattcgatttggaacgtggggtgaaagggatgaatgcggttaatatttgcttggaaaagcagtaaaactttatctttcccgacttgtaattaggaatattcgataaacaccatttgggggtgacttacaagagagcaagctttcctttgcaagaggaacttgctctttattttttcttaatatttgattcctgttttgggtcaacgtaacaatctgagggattctatatttaagcatataatttagcaagtctatataagaaaaaagctctatctcttactcctctgaactgtgctctaaatgctttgattttagcattgaatgactctgctgcggcattggttgccctcctttcaaagaaattgattatattcagataatgtgtttgtatagaacgtgagacccttccaaaggtgaggaaccctgatttatctacttcatcataccaccttgccagccttgtcaaagcaatatccttaaacttacactgatgatagattaagcctaaccgcatagacagataatatcctttctttatatcgggatattccttgaaaagaatttcagcccgtattctttgagactgagtccataaggattccttcttgtaaagcagataaatacttctcgctaacaactgctttcttgtatctccattagcgaaaacaggtgcatgatacatctttccacaggcctttgcataagcaatctgagtggactcttcatccaaagcctcccagcgagcttttacacgcatctcctgcacagcttcataagctaacttctgtacgtgaaagcgatcggtaacacgtttggccgaaggaaagcagatgcgtgcaatctgctccatgttaggagccatatccaaggttatctcgcgcacttggtaacggcggcgacgggagagcttaagcaggacagaagtgaccgtatgaacgtccgtacctttaatgatggcaatcatactacctttaccaccgtgagcttctttattggtcagtacagtatagagttccccacgcgagagggctacctcatcaatacagatataagcaccgatattcttttcgaatagtagccaatcctctgcatgaacaagttggtcccaatggagataaccacttagatggttacggtattgacgctccaataaatccccgtcaactccatataaaacacctaagagcttgcaactgatcggatagctatcaatatagttcttttaaaaaagacgcaaaatcttgcgtcatacgagtaccttcagccaccatacgccagttacgagaaatatactcattatgcttctttaagagccagcgacgacgacgaatattaaggaagaccttcttgccacggagaggaaaatcctgaacaataacagggtcataaaagcctttactctcagtatcctgatctgtatacttctcaggaacgatatttttctcctcaaggtagaacacaacttcatttacactttccttcacatcaacaagatcaaagtagtctaaagtgccttcaggaagaagaaggcgataaccgtttaattccataagctatgaatttggagacaaagataacaatttataaatttacccctcaggtttttacattgaccccctgttttgctgaaaatgtggaagcttgaggaaaaaagaaaatccctgaaatgtttaattttcagggatttatcaactttgaactctttaaaaagtggtgccaccaggaatcgaaccttttgcttcggtttattctaactccttgagtgactgcacattttttgctttatcttttatgaaaaccattgaattggccttacgctaaattcattgtttttctttactaatctgacaaaatttgtctctttgacactgcaaatataatacacaggttcgatttctgcaaatattttcattccttttaatccttaattccgcaacactattacaaatataactttttaagtacctgagcaacaaaaagttgctcaggaatttgccatgtcagatttttcacctatcttagtgttgcaaatcaaaatatgtatcaaacccgacagacatggcaaaggtagcaattaaatccgagaaactcactccttttggaggaatattttcaataatggagcaatttgactccagactctcatctgtaatcgactcaaccctcggtatgagatgcaggctgtatggttatcaatacagcgaaatcatccgttcgcttatgagcgtttatttttgtggcggctcatgcatcgaggatgtcaccactcatctgatgtaccacctttcgcttcatccgacacttcgcacatgcagtgccgacacgattcttagagccataaaggaactgacccaggataacatttcctacacatccgacactggcaagacctacgacttcaacacggcagacaagctgaatacactgctcctcaattgcctattgtccacagggcagctgaaagagggcgaggggtatgacgttgacttcgaccaccagttcatagaggctgagaagtttgatgcgaagcctacatacaagaagttccttggttatcgccctggcgtggcggttattggcaacttgattgtcggcattgagaacagcgacggcaacacaaatgtccgtttccaccagaaggacacgctgaagaggttctttgaaaggtttgaacaaaacaagcttattatcaaccgtttcagagctgattgcggctcgtgttctgaagagatagtggaagagattgctaaacactgcaagaccttctatatccgtgctaaccgatgcagttcgctctacaatgacatctttgccctcagaggttggaagaaagtggaattgggcggcattgagtttgagctggcctccattctcatcgagaaatggaaagggaaggcataccgtcttgtgattcaaagacagaagcggatagacggcgaactcgacctgtgggaaggagaatacacctaccgctgcatccttacaaatgactacgagtcttccgagaaagagattgtcgaattctataacctccgtggagggaaggaacgcatcttcgatgatatgaataacggattcggctggaacaggcttccaaaatcctttatgggagaaaacacggtgtttcttctgcttatggcactcatacgcaacttctataaattcatcatggcgaggcttgacgtgaagaggttcggactcaaagcaacaagccgcatcaagacgtttgtctttaagttcatctctgtgccagccaaatgggtcaggacatcaaggaagtatgtgctgaatatctattcatgcaacaatgcttatgccaatgtgttccagaatgactttggataacaccgacaacttatagtcgtgattttgcgtattgcctcaagtcgcatggtggggtaaggggcatttatatgtctttatggtgacattcgatgcactgtgccccctttttactaacgatgcagattcttttcgcttctgtatcatattaggcgcgtagttgcggatttgaggttaattatagttttcaacaagagaaaaaaataaaaacatgtgctaaatcaaatgcattaagaatttatttattgtttggggtgttgactttaaagttggaaattttgcttcgcaaatcattagaaagatataccccttgaatctttattttgcatgaataaaccaaaagcactaaaagagcaaaaatacaaatgacgactatttcactaggcgccaaaaagtttggaactgacttgggcatgaaggcacctgcaaagagatctactaaacataagattatagctcccacctttcctaaagcactctttacctttcttgatttttgtatctctatatcgcttacaatttgtgcaatcacagtattattggttttcattgcatattctttcaacgtaaatatcgaaacttcttcattattaaatagaaaaatatatttcccaattaagggtactgctagtgtacataatgcaaagaggatacaagtaaaaaatttcacagtccaaatacagacaatacctaatattacgaatggaatcaggtttattagagttaaatcctgaaacgtaattccaggttctttttggggacaacacacacctaaatacaaatctgtaaacaccaatagaataaggaaatttgtccatatatccgtatcataaatcttgtggttgtcaaataacgcaatcaaatctttcatgttgttcataaatacttttttaaattaatagtttatagtaaagcggcagtcaacattttaaatttccactgtattaaaatagagcctatactgaaaaggaacagggctattggttatcaataccctaaaaccttattcgatataatgtctacagattataccattcaaatatattatgtgttattggattttacaaatatacagatactattcagaatgtcataacttctccataaatattattttgtacagtttttttacttataattcatgcctttatcatactttgcggcattgctgcatgaaggaggtgtgcatgccaaaacagaaaagtttttgagccattcatgtaaaaaggatatacaggatgtcatctgatgacttttaatgacatctgatgacactgctttttatgtttcggatataaagcggttctttgtcgtgtattaatagtgaactaatccatgaaaatgagatgccatgaacatacaagaagcaaagaacatcaggcttgttgattttttagccggattcggatacaagccggtaatacagcgtgggaacagcgtatggtacaaatcgcccttcaggacggaaaaggaagcctctttcaaggttgacctccataaggaattgtggtatgatttcggtctggggaagggaggggatattataacgttggccaaggagatttatcggacacaagatataggttatgtactacagtgtattgaggataaaagagccgtactgaaaccggttactgtttcctgtccgtttgaaaaggcatatcccgcctttcaagatttgaaaatcattcctcttgccaaccggatactgcttacttatctgaaggaacggtgcattgatctggaaactgcccgaaaaatatgcagggaagcccattttaaacggaatgggaagaattattttgccatcgctttccctaatatttccggagggtacgaaatcaggaacaggtatttcaaggcttgtattgctcccaaggacatcagtcgcatcattagcacgccggaaagcaggatttgctatatttttgaggggtttatggattttctgtctttcagaccggcttttccatctttggaagagggggattatatagtgttgaattctgtcagtaacttacagaaggctttttctttcctttcacaatatgacggcatccgttgctgtctggataatgataccgccgggaaaaatgcggtgcaggcattaaaggacaaatacggaatccgtatatgcgatttttcgcatgaatattccggatataaggatctgaatgaatatttgtgcaggaagaacaatctgctccatatctaatagatgtattgaaaagactgcctgatgatatacccttgtttctttcctgtcatatgtggcaggaggaaacaagggtgatttttcatgtggtgatactatgttaatagtagaatgtggtcagatgcgttttatggtcttttacaatctttacttcatgcatctgtccgtatatctcacgcatggataccggacaatccatcttttcccattcttccggggaaatcctcatgtcggaatgcctgaaacacagcatgaccatttcctgagaatcctcttctgcgaatatggtaccttcatggtcgttgacaaactgtttgagtccatcctcatccttacaggatatttctccgacgtacatatcctcgctcggccgggtgtttttgcggatatggattttgaaccattcccggctttccggctgttcaggtgcgccacactcccacagggctattttcgcatcgtagtaaacctccccgttttcacatgccccgtaatgcccccaatgcttgaaacggccggtagtccatgccttgaaccttacatcgcctgcctttaccaacagacactcaccgccatgcatatcgcatttgataccctctttgtcacgggacacgaatggaacacgggaaaaatcccggagtataatgttatctccatatacggcatctataaagaacagccgggaacgctcaccataaccggaaacaaagaacaggttgtctcctgtccgtggatactggccggagcgtgtcttttcgatgtgttccaccatggtattcactttatctatatcttcctgtacaagtccatatatccgatcataccagtagttcaggcggatgaaagtttctttgctatacttgtttgttgtctgaatcataatttccttattttgtgattaaacatttccggctttggcaaagccggtatttctatctcttacatgtcagacatttgtcttttgctctgatagtgcaaggcttggcgaaaaaataccgcagcgaagcgaggatgattttttcagccaaccagtccgaaggaccgccttgcgcatcagaagcaaaaggctacctttacatgtaagaaatagaaatgctgaccgatatatgattccaaaataaaaaaacgtataatctgccggttctgtaataagaaagccatgaaaccctctctttttatcgtttccatgactttcttatgtttatgtcgtgatacttggaaacgggtattaccaatgatcaaatgtttccaccctgtttttttccaacagaacaagaatgtccttttccttatataataatttgcctcctactttgtaatagggcagcctgccgttcattctgtaatcagccagcgtccttcgtgtcagcttcaatttctccgccaactcgctgtcggtaatgtaacgctctccgttcaggaccggacgaaggtttttctcctgatcatccagcattttggacagggtgcttatgttccgaaaaaaacgtataatctcagggctttctttggtcagtatgaattgagtcataaggattcgggggttacatggtgaatactgttttccaaataacgtataatatcctgacgcctgtaatataccttgcggtctatatggctgtaagggataatcctgcttctccgaagttgcaacagctttcggggcgagacattcataagcatacacgcttcctggttatcaatccagtcatccatactacagatgcctcctccgcatgtttcacgcattctcttttcaacggcttccaaagcctcattcatttccatgaatgccttagcttcgatacatacaaattccataaactctgctttttttgtccggcacgaaaatacgggaagtaaaagtcatgggcaaaaggatgtcatcaaacggcatcagatgtcatcagatgtcagagaccgctctgtttggggaagcaaattaaaagaatggctaaaagtctgtttctttaccggaaaaacagtatttttatcccggacaatctgtccgaaaataaaaaaacaggaaatatggaactgataatcaatgcaacattattactaacggctatcgttctctggatatacggacaatactggagaaaaaagtgcggcaaggtgctatgccaatatgcagcagcctacgatgagcgggaagacagggagaaaccgctacgtcaagccatcatagcaggaaatcctcatgcaccgctgttatatgcgctgacttgtcctgagctgtttgataaagtccgtccgttgcgattgttctcattcgggagcattcgctgcgtgtttgccggctattattttcccaaacgctttgaaagctggctttgtgatgaccagttggcattcgtgcaaaaagtatatgatttcaaggatggaaaagacagctgtacggaatatttttcacaagcattcctgcttctttccactgatgaggatattactgccatgtttatgccgtgcagcacatcagaccgctattacagacgtttctcaggtattgccggttttctggaaacgcatggctatgtccgttcaggactggatttaatatgcattacggaaagcagggagtgtaaacacgcctcagaaaaacgctctgaaataaataccgccaactatatgatgtcaaacgatctgtacggaaagcgcgtggtgattgtcgatgatttgctgaccagcggatccagcctgatggaatacgcccataatctggaaagggccggtgccaaagtggaaggtgctgtatttcttgcccgtacctttcagatgccttcgccggcaaaagtaaaacgcctggtatggaaacgccatctatcagtcctgatccggagaaggtctgacgacctgtaaattgtaaagtttacattcggattttacaattttacacctcgaatttttacatttcaatttcccctatactatttttatatctgtattttattgatttgcagtgttatataattccccgtccaatataaacggataatgtggcatacatttttcactgaacatggcatatactcttgaaagtgcgcacaagaaaagggtattccagtaataacctttaaaaagacaggagaaaattgccatgatgtatatagacaatgaagtgcttgaaaaaatgataatgaccatagtggaaggttttgaccgtatagaaaagaaactggacaggatgggacgcgtgaaggactgcctgaatggagacgagcttttggacaactatgacattgccaaactgctaaacgtgtcattgcggacagtcgcccgttacagggaaaaagggctgatccgttattaccagacggacgataacgggaaaaacttctacagaagctcggaaatacaggagtttttacagaaacgtgggaaaaaagataagggcgggaataccaacatgggaaagttatgctaactttgtttcataaacagttgttatgaagacaaatgccaattcaagatataccgttgcagtccttattgacggggataacgcatcctttgagaggatggaagatataatgggctttgtttcccgttacggggatgccgttgtgagacgaatttatggagactggacgaggaaagcgctttccgcatggaaggaaagtgccagggagcatggattcaggcttgtacaagcttcctcccatgttcccggaaagaacacgacggacattgcactggtcatagatgcgatggatattcttcgggacgggcaggtggactgtttctgcctggtggccagtgacggtgattacagcctgcttgcccaacggatacgggaagccggggtgaaagtgctgggatatggggaaggaaagaccccggtgtcattggtacggtcctgttccgtattcctgtatgccgaccggaaggaaagcaaggcagaggagaacactcccgaattctttatccgaagggatatggagtatttcgacaaggcttttgagcaggcggctgacggcaaagaagaggtttccctttcactgatcggcggtgcattgaaaaaaatgatgcccaaattcaaggtcaggagatatggatgcaagacattgggcaaactctatgaaaagttggaccggtatgagctggtcatgacggaaaagggagtggcaaatgccgtacggctgaaatattaaaccgcatagcaggagtgttccaaaacgtcagtttctcctatacatcgttttatgtatcaggagaaactgacgtttgtgttctataccgggatggggtttacccgtaatgtgtcaagattgagataggctccccggtagaacgttcttccttccctgagcatgcgccacaggacgtcgcatccgatttgtgccaacatggaattgatgaagagatcctgtttttgcaatgcctcagtcagcgagcagctcggtcctgaatccttctccctgatggtggaataagggacttcctccgttatgacgttcatcttgggtataggcaggtattcagtggaggagggctgcggtatcttgcttttgacattacctatcagtacttgtccggtggtctgggcattgccgaaatccatccagtatatcggtgatttctcgtcatcgtatgaacgttccctatgctttttcaaaaaacgccacagaccggtccgtgaacgggtggtgtccgtgcaggtgatgatgatattcgccaaaacggaatctgatgttcctgacggatagcattgcccttttgcttcccatgaaaagccgaaaaagcggttgatacgggttacaagtgccaccgccttgttcagtccgagctcggattcgctgaacaactggcgtccgatgttcgcttccgtgacagtatcggggtcaaaaaccgtcaagtgcaggcccggatgtccgagtgcctgcaatgcgatactcattcttgccagattggtggccacctgcgatccggttccgcccgcaccgattacgaaaacggttacgggatggtggggattgagcaggtatctgtctgtataatgaatctttttcatatcaataagtctttaagttgtctgtccataggtttcaattcgttatagtcaaacggattggtccgtgccttttccgtcaccgaaaccagattgctttcggtgggattcctgcttcctcccaaatgggaaaattcactgagccagaagcgtttttcccaatgctcaaggagttttgagaaagtcatgttttccggaggagtcaacgaggcatttcccaggcagacactgcttcccgttacattgaaaaacggggcaaggaaaagcgggctgtcttctgccggtgcttctcccttataggcaaaaatttccagtctgtcaccggaagccctgtaaatgacaccgggtacatggaatgtcccgtccggaatattcagcctttcggaaaagaacatctgccgttttcccggaggattgtaccagatgtacctctcgtgtcccttgcgtgtatcgcaccacagcatattggtggggattttcccatgcggtacatcctgccggttatccgtatagtattccacaagggagtccataaattcatacgtaacggggacggcagcctccatccggcctctgtcgttgatcggatgcagttcgagataatatgtcccgtgtccatagcggccatcactgtattcgtaagcaatcagtgccgctttgggaaccatcacctgttgaagtttcttagtcagttcattcatgtcattcgttttaaaagttgtcatcaatatagcctgtaaaacacaccaaccatctggaaagcctttccggatagtcatccatctgaaaaagactgtccgtttccggtgtcagtagcttgtaagtgaccggagtaagggcataggtttcctgataatccgaattcatataccccttgacacactccgccaatgtatcatcagcagaatagaccagtatgacctggctttccattcccaccgggggaaaatcgcattcctcttcataagcccaatcgtactggtagcctgtcaataccgggctttccggagtaatcaatgccatgccgtcctcaatcagttccaacagcttcagctctttttccttttttgtccggtaattccgcacagcctcctccaaagacttgcagaacggtttgcccgacatccgtctgagtgctttcatccgttttccagactgataggaatctgccagccgtttgttcgccctgatttccttcggggaagcatcggaatcccggtttccccagtcttccagttcttctatggcaaagtcataacaaaatgtctcagtaatatcgtacagtctgtggtgtcggacaaatagccggatgaactccctgacaatgttcttcaatgatgccgaaagccgttcggtaaaatcaaccggaatccaaaacaaagtaggttccggccagtcatgatggcggaacagacagaaatgcagccttccgtccttcttttccagattgatacactccggtacacactcttccataactctgtacaactcggtaatattcaggcgggggcaaccccctttcctgtatcggaaagggagttttatacccataagttccgcatatcttgatgccgaccggtagagatagtcaaaattttccggagtcgtgagattgaccggagaatcattatccatatcctgatgccaataatccggtgcaaggggtgtgattctaccggtcagaaaagcattgtgcttcccggtggcagaagtatccttcttttccgttccgaggttccccttcggatgtgggacgaacttactgagagaataatcagccgtgccagtccatccttggcttgttctgaaagctgtctgcatgtttccttatccttttttttcttgttcataccgcttaccctttcactccgatggttgtcttgaagcggtaaaccgccttgtcgtcctcccactcaggaccatgtaccgttgccgtagtcagttcagggtaggtcatggaatagaagtccatcacctcgtttacggacagttcgctgttcggatcatccaacacgagctccacggagtccttcttgaatttgaatactctctgcaatcctttgatttcaagtgccatattatttttcttttatagggtttaacaatataccatatccatttgtgccatatccgtcatgcggcattccttcggaaagtccggatattccgcataagggtcctccctgagtagctcccggtcatcctcgtaatccttgtcgaagttatacattgcagcctcctgcaccgttgcatactgtgacggagccggttgttgcatccagcgattgtccgccaattgcggttgcggcacctgtaccggttgatggaactggatttcttgcggttgtggagcagcctgctgaggaaccggttgcggtgcaggttgcctatattgtacgggctgtacttgcggctgtgcaacgggttgcggagccggggcaggctgttcgggcatggacatcggaacttgctcttcgctccggtattgtggcgtctgggctgccatcggttgtggagccgattgctgcaaggatggctgtggatcagttaccggcggctgtaccatgtcgaacagacttccctcggatgccttcttctgcacttccgccatttttttgtcaatgtccgcctgtttgtccggctgtgccagtaccttagcctgcctgagccaggtcaatgcttcggaataatgctttcctgccgtggcatcctcagctttcttcagcagtttttccatcttttcccgtttttcacgggcttccttggactccttttccaccgtaggcttggaggttttgctttgtgaaaccgcctgctctgcctgcttctcgaacgattccaggttggtaaggataccttgcgctttctgtacgggtgcaccgacagcctgcaggaatcctgcatccagttcttccggcgtaccgttcaggatgagcgggacaatgcgttcgccggcctttactcccgaccgtctgggaacgacggcaaccgtcagattgtcgtttacccgtctgatgttgatactcaggtctgtgcctgccgtaatcatttggttgattgcttgaaaaaacataatggtaaaatttaaaatgttatacataagtttccttgaaaaaatccttcaggattctctgcctgtccggattcgaggcgatgcctttcaacggttccagatagtagccgatacgtctgggcccgtctgtcgtacagggaggctgtcttttgacaggtgttgtccggtttgtggcaggccatgcagccggcatgaccggagccgaggatgtaaatgtgtaagttctcatatcttctgcatttgatggttatacaagcatgcccatgacaatcaggacaaggattgttttcaagacaaaggtgaatgtcctgaaggcgagacggaccagtgttccggacataaggaacaggacagacaggtacacgggaatgacgcccttgcagtaaagcaggcatattcccgtaagcagaaccagtgcgaccacttgcctgcagatgttttcgatgagtttcagtttcatgtctttaaatttttaagaatgaataatcccatcgggatatgttttcccgattttataggcctccggcccttggattgcctttttgcgcaaggcttggcaaaagaaaataccgcagcgaagcgaggatgattttcttttagccgaccagcccctgaaaggggccgccttgcggcaaaaacgaggcaatccaagacctttgccgcttaaaagcggaaaaacgtatcttgtacatatataaaaaagaggcacagaccccagtctgcacctcttctgttccgtaccttccgcccagccgtctatatggaaccatgcggctgtccatcttccgaaagtttccggaaaatctcaccggtaacctcatttaccgtttccaatacgccatccagaaattctttctgtgtgagttctccctgttcaatccgtgccagctccgcttcccagccggaggtgagggaggcgtcagccactttcattccgcgtaccgtttcatataaaagaagaccttttggggtcgggataatgtatttgcccgaataccggatatatttacgctccagaagcgtacggatgatattcgtgcgcgtggatgcggttcccagaccggtcttgtccatatagtccgccagttcctcatccgtataaggggcagcgggcagcgatttcctgtgtataaggctgcatcccgttaccggcagcttctcctcccgaaaaagttcagggggtacgggacagaggtcgttgtcttccgcgacaagccgttccctctgaaagataccgagccaccccgcttccagaatacggtatgtacggattcggaacttgcgtgcggcacagaccgcttcaaccgtcgtatattccaccttgcagggcggcatgaacgtttcaagcatcctgccgacaacaagggtgtaaaccagcctttcctccctgtccagttcccccggctgtatgccggtgatgacaatggcatgatgctccgccgtgtcctgatttccggttacgcctttccttgcagcaaggtcgatcataccggcatattgacggaattccttgccggacagcagcttttccataaccggaggcaacatgtcatacacgtctccgggcagcagacggctggaagtgcgcgggcaggagatcagttttttctcatacaggctttgggtaatttcctgcacccgtatggctgtcaggttatggtaacggttcgcatccttctgaagcccggtcaggttataaagggcaggtgcggtgatttcctcagtccggctgttgaccgccgtgatacgggcatatcctgccgccttgcagtcctcgtaaagttccagggcatcccggcggttgcagaaatcttccacatgccgcatctttattatcttcccgttcttgcagaggctgacgaatacgggccagctgtctgcgggaatgtgattttccctttccctgtaccgtccgcttatcgctgccaatacaggggtctgtacccttccaagcgagttgttcccgaaaccgaccgccttgcagacggcatagctcgaattgactccaagaagccagtcggccttgttgcggctgtctgccgccaaaaacaagttgtcgaacaggctgcagggacgaaggttttccattcctttggcaatggcttcgtccgtcaaggaggagatccacaggcggaggcaaggtttcctgcatcccaaaaaacgataaagataccggaacagcatttccccctcgcgggaagcgtcggttgccgcaacaatggtgtcacacgcatcgaacaccccggctatcaccttcaactggagcaccgcattgatgtcgggattccatcccgtgtccgtctttacatgccgtaccgtcagaaaaggaggcggcagcagggggaagttctcccgctccacccatgccgtaccggtatctttcggcatcgccagggaaagcatgttgccgtatgtccatgttaccatgtatccgtttccgctcatatatccgttctcttttctgtcagctcccaaaacccttgctatctctctgcccacattgggcttgtcagtcactatcgctatcatattctttttccttttgatgttccgtaccgtcaggaacggcacggaacgtgagttatacttattgtttcccggtcaaactgccgcctcctccttctgacggagaccgtttatttccataaccggtctgccgttgccgtcgggtaccagcttcagcgtggcatccattgtcaggctgaggaccgaaatatggagtttcagcggaacgatgcccgtttcctttccttgcagcaacagttccatgttgccttccgcttccagttgtttcttactgatacctgcggccttcagaccgtcccagtcgatatcttccgtcttataaatatgacgggtattctgatccgtattcatacgattcgtttttttaggtttgtatgattgattctgtttctctccgggcaggtctatactgcctgcgatgcacccttcttctgctcctgctgttgtccctgtgcggtctccgtctgtgcggcacggcgggaagtgtccctgcggatgtccggattttcctgaaaatactgcaactgcccggaatagggattgactttcaggtaggaactgaaggtctgcccgttgtttttcagcccttcgacaagcaaagtcttgccatcctggaggttcgctttttcctgtgccgtgaacacgtgcccgtaaacctccgccggaatacgcggtgcctgctgctcgttgaatccgttcggcgtgcgtgaatacatcgtcctgccggtattcatatccagcttgacgaacgaggagaattcctccccgttgcgcccgatcatgttttccagatagaccggctgtcccttgcgcagggtttccctgtcttcggcagtcagctgcacgttgcagatttcctttggaatataaatctctccggtttccggattgtgccgcgtgtagttcgggcgccccgtaaccttgtctatcgttacaaaggacgagaaggtgtcattcctgttcctgaacttcatgtcttccaccagaatggtatgtccttcgctgagcatttttatctgggtgggcgagagaggcacgcctccgatggaacgttcgttgaaaatctggtttttcggaaagatgaattccagtcccctgcgctcggcactgtactggagtgtggcatcgaattccttgcctgctttggaagtcataccctccactttgacaggctgtccctccttcagcagcctgatctcctctgcggtaagtttgaccccgctcacttcctgcgggatgtaaacgtgctcctgacggacggcaaccagctcgttggtgctcttgtcgatggaaatcagacagggggtatattcactgccgcgcaggttgagttctgccacacgccccatgttgccggtctcacgcaggtttttcttgtcctcctcgttaaagttaaacccgaaataaggacgctccaactgcggttccttgcgtatgccgtgaatggccagtcccacctgtccgtcctgttgcgggatgagtgagagccttgcatccagtttggctgtcagcaaaccggaaagatggatggtcaggggcaccagtttgttggtcttgtagcccttcagcatggaatcaaggagtccctgctgttccagcgaagcctttgagattccgaccttttccaactcctcccagttgaccatgttctcattataccggtaacgcggtccttgcgactcctgcgctgcctgttgagcctggggctgctgctgttgctgtgccgcctgctgtacttcgctctgttgcaggggttcctgcggttgtgtctctttgtctgccatagctgttttttctttttggtttacactttgttccttcttgttttctctcggacggatttcgtagcgtttgaggaactctttcaccgcatccgtctgctttccctccgacaaatccctgatggcctgcttgttcaccttgtagtcgtggtaggtcatgcggagcaggcggaaatgggtaggttccttgagctggctccaaaaattcttgatgaagttttcgagaatactcgaattcttgtcgaatttcaggaatgagttttcattcttctcgtccgccggaaccgtcttcgcttttccgtccttgtcaatttcactgacagcctgtacaccgaatttcggatcgttcttgttatgaacaagcatcaattccgtaatctgttccaccggaagagcatcacttccggccttcggtttccgggtccgtttgggcttttcgttcgggatcttttcttgtgccataccttttcttttaggggttaatgaattgctttgacgcttcaaaggtatggggtatttccaaataatatgctgattttcaaaaaggtgtcatcagatgtcatcaaatgtcgtcagatgtcataaacatgactgttcccaacggctaaaccgtgaacggagaagaagggaagtgaataaacggaaagagagaagatacgtgaggcagaagggaaaaagcctgcgcatccgacaccagaaaagagcaggcgggcaggcaagacaaaaccatgcagaacagagggagctgaagccccctgtcttctcatgccttccgcttttttacagcaagactttcataagacctgtattccggctggatatgtggaatttcatggattatgaaatacggcctcttcaagcagcccatatcctttatccatgcgtcacatcggtcgcagtttgcccctgtaatcgtttttcaaatcgaatctggattgccgccgcattctttttcgtgaaaattttccacggcgaagccgcaaggaaaatttccacgaaaagattcggcaaatgcggccggcaagacaaattcgattttcctttgatgagggggaaaactgtatcgcaaacaaacctatctggaaattccgtgcaggctcattttcttgtaaagggtcgggcggctgattcccaacaaggccgctgcctgtgtcaggttccctttagagatggaaagagccgtcttgatctgttctatgtttcttctttcatctttctgcaaacacttgtctatcttctctttccccatggggtcagaaacgggctctcccgcatattggagccgtaaggaattgggggtaatcagttttcctttgcatatcaataccgccgcatgaatgacctgcttcagttcccgtacatttcccggccaactgtatcccagcagcatcttctttgccggttcgtcaaaatccaagacctctttccggagcaatccgcaagattgctcccggaaaaaatccgccaaaggcagtatatcctccaggcaattatgcaatgcaggtacggtgatggtaaaatcctgaaagcgataaagcaggtccttccggaaacgcttttccgcaacagcctcctgcaaatcctcattggtggccgcaatgatgcgcacatccatcagcctgtcccgttgtccgcctaccggacgataccgccgttcctccatggcacgcaacagcatccgctgcgtttctatcgaaaggttctccacctcatccatgaacagggtgcctccctgcgcttcctgaaaatatcctgccttttcctctgtggctccggtaaacgcccccttgacatggccgaaaaaggcggaaggtgccagctctttggacaaactgccgcaatcgaccgttacatacggcttgccggatctgaggctctgcctgtgaatcttttttgccaggtgttcctttcccgttccggtgcttcccaatatcagtaccgtcatatccgtcggcgctaccatgtgaatgtaccggttcaactcgcaaaaaggggtgcttttgcgttcatagattaccttggtgaaagcctcgttcaccgtccttatttttttgattacgggcagcagcctggtttcaaccagcggtttgaggatataatcttccgcacccagcttcatggtatgaaccgcagaatgtatctcttcataattagtcatcatgatgaacgggtgcatatagccgttctccctcatccactgcaacagcgtggtactttccccgtcaggcaatcttaaatccgccaatacgatgtcatcctcacggacggatgtcccaatgaccttcttagcctgtgccagcctgtaagtccttacagtatccaaatccgccttctgcaaaaaattgcagatataattacagaacaagacattgtcctcaacaacaattactctcataagctttcttagcctgttgtgccaaacatattatttcttttcctttttccaatacctgctgtacagtccgcccgaactcgtccacagaaaactctcccgaatcctgaagcagtgcgaacaactcatgcagcggcttgccggcatgaatgatctcccatgagcctgtcagatgatgtatccattctttcagtgcctcatgatcattcttttctgcacattcagccatagcctccatatccttcctggtctcccgaatcagggtatccagcatcttccgcctgttcccatatttcagcagggcatcgaggtctatctgttcagactgcctttcacttcccagacattccgtacatacctgcaaaagttcttcggcggaaaacggctttttcaaacagcccgaaaaccctgccgcatacaaatcccccgtatcgcagtttcccgatgcggtactcgcgataaccggaatgctccgtgaatttcccacattggccatgcgcaggagcttcaacacctcgaatccgtttgtccggggcattttcaaatccgtaatcaaaaggtcataactacggctgcggacatgctccatcagatcacgcgtgttctcacataccgtgcaagccaccccgtgatacgcaaacatttccctgattgccgccagcaaaacggtgtcattgtccaataccagtaccgtataggaccgtacggaaatccggctcctgccgctctccgccatcgcttcctctgccacagccaaaggaagacagacagtgaaccggctgcccacccctttccggcttgccacttcaatcctgccgtccaacaatccgaccagaccttttactattgaaagtcccagtccgaccccttcttccgcaatcgcattgggaagcctctcgaatgcagtgaaaatgcgtgtctgctcctcatcgtccattccggtgccggtatcttccacgataagcgtcaatacgccctggtcaaattgtgtgcgaaccgttacacttccccgctccgtaaacttgattgcattggacaacaagttgcttcctatctgtattatcctgtccctatctcctataacaaccgcatctccggcactcagcacgttcagcaaaaggttttttcctgccgccagcggcataaaatccgtttccaaaatctcggtgacggaacataacctgaacgggacaggaacggccttttccccgccactctccaaccggaaaaatcccaacagggaattcagcatggaagacatgtgtcccgccacctgccgtatgttccggctgtattccctgcacttcgacacttctctttccgtggaaagcaattccgcatagctgctgatagaagcaagcggcgcacgcaagtcatgggttacggccagcatgattttctttcttgcctcaatcagttcctcgttttcaagaacggtctgctccaactgacggactgtgccttccagcctttttttataacggtttatacgcatcatatcccggtgtatcaccatataggaccatatcagcagcaaaaccatgaatgccgtcagaccgatgaccgtggcaaatgaccgtttcccggcttccgcaacttcttcttcctgtctcttcaagtccgcttgtaccgttccatccatattctcaatcatctgccgcaactgcacattcagccttctgttcatcccatccaagctgtccgtccgttctgccagcttccgggcatacgcctgctgtctgccaaccacgctccgattaagctcatgaagcatggaggcggcagaaggagaatccgccctgtggcgttttgcgaacaacctcttcaggaatcccccttttggggcattttcccgttcactctgtctggcaatggccggaatcttcgctgcaatttcccggtcggcttcctcctgcctgtgtacccaatatatgatttcccgcatataccgctccttggctctccacaaattacggatgctgtctgtatgtgagccggaagaggagtacctcaagctacacaacaggctgtcaatgtgccgtctccgtttctgaaatgataaaaaatcctgctcactccactccataaaggtttcacagaagaaagaaagcctgagcattttcacgtatatatcatttatctcatgctttttccggttaatcatccgtacttccatttccctagccttagtctctttccattcgcagatgccaacgtaagcaataccacttatgactacaatcttggccatatatcctaccgctattttggcaagaagcggttgcaggcgcaaagatttcaacaatttattcctactttccaattattcactttttaattcattatattctattaaaattctttgcaaaataaaccgaccagtcggtttattttgcaaagataagccttttccaagaataatgaaaaaaaacaggttccagcaagtaaagttttatcatttatcagtctaaaagacaacggaatgaactgaaagggaggaaaaggaaaggaatgcgggcttaaatttctgagaacatccccaagaaagtcttaccaatagaagtgttcaatgcctgtctgctgaacgccttggcatccttcaaacttattttatgaccataagccacattggaaagaaagtcctgttcccggacaagaagttgctgatacatttgtggaaattcgtccatatattcatgggcggaggaaacaaactgcatataacatatcaggagattgccattcagatgttcgggaaaactgtttatcacccgttctatcggatttctgtattgccttaaaaactcattccaatccttgtcagccaaagaatacatttcacaagaaatctgcgagtcggggaaaaaacgcattctgacaaccgcatcaatcagtttctttttggaaggaaagtagtgtatgacagcccctttggatttatgcacggcaacagccacatcacagaatgaggtctgcttcattccttttgtgatgaataacctgtatgcctcctctataatccgctgtttcaaattcgggtccatcctactgcctatattataaaaaaatagcacagacgcaatcaacatccaaacatggtagtggaatacctagagacgaagtgacgcacctgtgctatatattttaatatagcgcaagctgtcatattccatcttgtctctttgaaattttccacttttcgtttggaagatgatatatgatactatactatgtcgttttaacagcgcaaaaatacgttatttatcgtttatttccaaatttatacgacacttaatagcactgttccataagaaaagcgtccgctttcagggacaagcagcagtattttttcaccggatttgagtttacgggtagaacagaactcatccaaggcagccagtattgctgacgatccgatatttcccacccaggtaagattggtaaaccactctcgtttgtacaattcaaaactctcgtttttcatcgcttcaatgagattaccataaataaccattgacgaagagtgaggtattacataatccacatcgtcaggagtcatgccatgtttattcagacatgatttaatatgtctaatccataacggcatcaacttcgtccctaaaagtttaatgtcctgtttaataaccataagggactcatcgaccaattcctgactttcaaaagatttccagcttttcagttcaccgtcctccctccggacagctccggcaaacatacaggtaggggtttcattggcatatgaatccatttctatccattcaatctttaaagatacgcccttttctcccggatgattttccaataatgcacaactcgcaccatcgcttaacataaagcgcaggaagtccttttccaaagccatatatggattggtgcccaaattgcagcatctttcatattcgatatcgaagtttttggataaaagcattgctgacaccaattcagatgtgctgcatattgcattctgtttttctgatgcagctatgctcaaataagctattttcagcgcttgcagacaagacagacaaactccagcagaagagaatatttcaacaggttcttcccaaagcccatgtaccatagacgcatgagaaggcagaatctgatcaggggtcgcagtagcacaagcaagcaactcaatgtccttttggctcttattggtcaatgccagcaacttacgtatagccagcatcgccatttctgcatttgtatgtgtgatttcttgatttttgtttaaggcatagtatcgccgtttaattccattttgctttaaaactatccgttgcactttggaatgttttccagaaatgagtcccaagaactcttccatttcatcattggaaacaggagagttcggaaagaagcttgcaagcccagtaataaaaacatctttcttcattagttcaatttttaattagttcatattgattataaagaactactttcagttcttctattcgcaatccattcaccaatgcatcctgaaaacattttccaaacagcaggattcgaaatgtcaaagccaatgtagaaggattaacatcggatcttatttcttttgtttcaacagccttcacaaatattctttcccataatttaatctccttatttgttatttcgttgaaagcctcgttaaatcccggatagaaatattctgcctgcaaaatcaagttaagatatgcacgtgtaatattggtcttctctttttctatgagatagatcctcattgcattcatcgtttcctccaccttctttatgtaataatcaataaattcaagcagagaggtgtgagaaatgtccttgaacttatttttggcatcttgtttgtgaaaaatgtaaaaatcaatcacatcaataaacagttcttgcttgcttggataatgatatgacatacatcctcttgataaattcagacttttttctatctccttcaggggaaccgtgttgtaatcttttgtcagaaactgtttgtatgcagcttccctgattaatctttttgtttctgagccttttactcctttcataaccttgttttttagtatcatacaaaagtaggtcttttgagtgaaaacacgttcatttttagtataattaaatatgtcctacccaattaccattaaatcatttatgaccatacataccagtttatgaaataaatgccaacgatgcctttttcttttttttcttatacatatattattttttgcttatatttgtcttcaaataagccgattagtcggtttgttcggcatagaggaacccaaacagaaagtggaatttcaaaacagagatgttcctctatgtctttgttattccatcttctggcaaccggattctatccctgttccaccatatccctaaaaaataccgaccggatggtattttttacggcaaaagtataaatatataccataaaaacaaagggaaaggccaattatgcattctatcggcaaagaaatgcctatgaaatatacataatccgcttttccctatgagaaacattatgttaccggcttatcttgaaggcatcttcatcttaacctgcaccccctgtgagtttaaaacacgaaccggtgtcttttctccggctttcaaatagaacagaatataatccttcgcacgctgggactcgaagaaacctttttcgcgatattcggcaatccacctctgaatcatcggaatctgccaacggttcatcaaaatatagtagccgaaataatactccaaatcgctcaggaaaatattgagtttcaagtaatcccaccagaactgttctttctttttgcttttggcattgagtatgataacctgatgttcataagtgtcacgaggattttcccaatcctgttgcgaaacaaatacatcgggaaccacattatcggcatgatcctttgccggaataaagggaaataaggattctattgaatcctttatctttccatataaggacggttcgtactccttgttgtacagcataacatcccgcaaacgggtggaagtgagatgggttaccacggaacgtcctaccacacaatgatccggaacagtcattaccgatgccagacgtttcataaatctgacttctgcttttgcctgttcttccttatccggtctcttgaaaggataatctgaccaggcaatcttccgcatcccccaatgcaggtctgtaagttgcaaccccgcataagcacagaaaatggaagcacgaattatcttgaagataggggtacggtcaccctcgtgggccacgtaaggcaggtcttccacgccaaaaagcatttcattttccgctatcaaatcggcagagaccgtcttgccttcttccaagcgtcccttaatcttgaagttacgcttttggtatccccaagtgtgaacaggtcgcgtagctatcagtgccacacaataattgccgttttgcggcatgaaatctacattttgcggtgttgcattgagcatcaactcgttcagcaacttaatcttttggatatagtccataaatcaacaggttttaagtgaaacattttgttaacagtgcaaatgtaggcatcaagtttcgtaccggagttccgtttttcgccgaaaatcactgcagggtcaaccaattattcaatatttattctgttctcgattctcagtatatagtttgtttccgagaaaaagcgttccatacgtactgcctgaccggttctgaacaaaggtttttcactattggctatgtaggctttttttatgggaaaattccgtgcctcttcctgttgttcaaaataaccaatggtagaacgcaactgctgttcgccgtcttttatccattgattacccttgccttttctttgtttcaactctacaaatataatcgtatctctataaaacaggcagccgtcgcagcggttgtccatactcccgtccgccctgcgcagttcaatgcaatggtcaaccggtacgaaattcacctttacctgaggataattgtccactgccgcaatccaatcctgcccctgtctttctgcaatatatgctttttcagcggcaggagccggccggtcgcatataccgaatttgcgtctgtttgatgatgatatatgttgtgtcgggaagaagtcaatcataattcctgttgtatttccaataaatcggcaaaatcttcgtttgttctctccagcatcctgttgaggaagttctcatcggaaggaagcccatgatatgtgtccagtactgttactgtcccttcgacctcgttgaactcgtaaatagcgatttcgtcagggtgtatggcagcttctatgggataaatagcatttatcctttcttgtacctcacaggaaagattacctacagccaacagcataccggctttgacagcgacggtcaggctattaataaggtatgggctatgtgttgtaactaccaaacggtttgtttccaaagcattgttaaaagccagcaactgtttcattatcatccattgcgattccggataaaggttttgttccggttcttctacaatgttgacaaatgccgatttgttgaatctggcagaaacggctgaaagggcaatcctccgttgctcgtccgtaaggttcggtatgttccatatattcgcaacttccgcttcgaagcgtttcgcttcatcgctgctcatcttctgggcactattcgcctgactttttacagattcggacaaatgtaaagaaaccaaataaagcggtacgatggattggaatccgctggacgcttccatcaacttcaccttatagtcctcacctttgacataaacaatgtcattttgtttgttatattccagttgcgcatgattgataggcagttccagactactcttaatgcgttgtttggctttgtcatattccgtaagaaaacctagcaaggcatccggcaaatccttaatcagattcggtttgttgaccatgctgatgaaattccgttcggcaggaacgtacatgatttgaggaagggcatagctgtccaatgcattctcattcttttctatgacaagttcgccttgcttcgtgtaggtaaacttgtaggaatccccttcgtagaaaatctcagtctgttcctttatgaaataattggaaatacgatggtaaccgcaatacttgttcttgaacttggcggcggtaaattctttctccttgaaatcaccccgtgtcaagaccttctccatccatgtaaaggtggaaaccagtttggcaaccgtacttttaccgctaccctggttacccgtaaaaacggttactttctttatatctatccatccgtccgttacagatgctgtttctttcaacggaccgaagtttttaatcttgattctactcatatatttattgtatagacctgttacaaagatagtgtttctaaatgaaacgacctaatgaatgttgtgtttcatttgcagtgaacatagaggtcttcccaattctttgtttttccaatttttaacctgtatgttttatgatggttttctaatagtcagaagtgtcattctgatatccgaatgtgtatcagtcggcattgaacggacggatttcggaaagattttcattgccgctgtcaataaagcggtcgagcaccttaatcatgacaacaggtatattctgcttccatagtatctgtgcgtccagctctgtacaaaccaatgccatctgtttcaattctttttccaagtatgctcccgaactgatatattcattcagaagaggtttgttttcggataatttgattacagaggcatataacttgtattgttcattgatacatttcaaatgaaacttgtcctttagtgtggaaggcggatcaagtaatttcagtttgggcaggtctgacttgttgagaataatcacagtatttgtaaattcgactgtatgatctccaggcagactatacaacaatctgttgtcaggggatttgaacttatactcgttttcctttcgtaaattctgaggataagcattgtaccagttgaagtggaatccgatgattatctgtttgtcggtcaatcttaaagtctggaaggccttgtcaagattctccggaaaaaccctatattcacttttaggctgatactggaagcttcggagccagcagtttttgaaagagtatagtgtagcagcactgaaagactccttaaaattgacatatcctattgttttatccgtacagaatgcctctgccggcatcagctgacgtattcttccgacacaattgaacttgttacagcttttgtactcatcatcagttatgacagaaacttctgtaatccacttcatttctctgccaatactatctgatgctatttggtaaaaatcctgaatttcatcttcagacagctgttgagtaactttttgatgttgtattgttgaagtaagcgaattggaaagggactccagtgcattcttcagcttatgtttagccctgtatatgcacgactgatccaatggcagtattgttgtgatgtcttccagtggaatggaattctgctcaatctgtttcaggataatcggaacattttccagccattcgttcttttcggataaggattcaggaagagccggcagtgaataaaaatcctcgtaaacataggtgcggttaagtgttgccagacgtaacattaggatatacaagtatttctgtatccagccattgatgatgctattgttgcgtacgccagcctgaagaccaaaaaatggatatttttgctcgtatttgtacattgaatcgggactgaatgagagcaagtccatatacagtggaataatttcagccagtgaacttggaatcagtacataatgagggggttggctattagtgtaatacaatatttgatttaaaagttcatattcttttctatataacaaaagtccacctaatgcgatatgaaactccttaaattctttccgttctttctgcctaagctctaccatttggctgtttgcaacagtttgtccagatgaagtgtagggaacgtttatacgttcatcaagttggaaagatgtaagatgaagaaacaagtgtgaatgggctgcaccccaatatttaagaatccattcgctgcgcttgtaaaacaattgctggttcaaacaagtccaaatcgtacggtaggtattctgatgcattatggtgaactgaaaatcatccagcattgcattgactatatcatttccgttcttgatggaaaccgcttccttttgttgcatgcacagctgctcattaatggagacaatgccttcgtataactccggcggatattccattaacgtccattgtttacctgcacgtaaagatatgatccagtcatacaattcctgatagcaatcgcgcaatacatccacattgttctgtttgagcatggcaataaaaagttcgaaccacgcttttctggtatcttgtgggatattgtttctttttatcaaatgcttttgcagcttttcaggtacattatagatatagataagcctgaaaatcataaatatactgaatgttagcagtacacagaatattgtcgcgagaataatggcagaataatctatgtactttgtaagaactccgaaatcaaaatagttaggtggagcgaccaattgatagaacagtaaaaatatggtaatagcgagcaagccaagaaaatgctttgtgcttctttcgttcataaagagttgtatcaggcgggtagattcatacttatcgtctatccgctgaataactccaattaacaagggaacggcaatgcccagtatggctgccgttataggtataataatttctttagaaaaaatgtccataatataaaaaatgttcaatagttgctatggtactggaggaaactttatgcgtccttctttatcgatggtacaagataaggcttccccttgaatttttttagctatacggttataatttgttgctgttcgtgtttttaaatctaccatttctttccaatcaaaggtatgctctatattaaaaacattctgttcatttgctgaagtaaatcgcatggatgattttacatggatattaccctcttgagaccggacattccagttaaatctgggatgatattgtaattttgcagcgaggcataatctttcgactgttgcctgaattatacctatagtcgtgtttaaatctttcagactttgggagtaataccatttgaattcatcatagatttggtaatccaagggattctcaaaaggttggaacaactggtaaattttgctcaaaaatgatgaatcatagtcatgtaaaaatgccggaacctcctgatccattaaaacacggcagcctttggccccagcctgttccaatttgacagccttacttacagcatttcctagcaacatttgtcccaaattagtgttgttatcttcaatgatatctccgtatgcaataccaccacgacatagaataccattttgcaaacaatcccacataatagtatgacatgaaagtatgacatctttcatgttttcagaccagacgaaagcgcaatcggacaactgggtgaaatttactgtagggtatttactctggcagtttgccaagattttccgaaaaatgatcaaaatattggctgcaaattcctgattccctgaagtctgaaaatgtttagagacctgccaaatattaaaatcgtcttctgtaagctggattttaccttgtgttaaagctgaaaatcctagtatatccacatagaagacaaaaccttttagattattcatgttcataatgttatcgtttataactggttgaattttttttggacattttgagctatactgatgaaacagttgggaattgtaacatattagttgttgcttgtcacaaagatagtatatctaagtgagatgagttaatgggggctttgttttatttttgattttgccaataaatggtatttcctaaaataattttgtatagttcttcatttttattgtaaaacaagttatattcttctttatgtttccatcttgaggctgttttgatgactttaatgagtttattattatcataaaagtattctatagttgaactatcaccataaatattaactccaacatatattgaattctcattatttactatttcaaattttgatatagatattaaattaattacgggtgtattttcattttctgttgggtaatatttgaaataggttttgttatatccatgtttagaatattcatataaactgatatataaaccttttcgtatatctgcatctatatgttgctctgaaataatcattttgttattttcatcgaagccaaatctgaacaagtcctgataattccatttttcaatggtcatgttttttaaaagtctacctttttttctttattaagtaaatgataataaggtagtagattataatattccttggtcgaatattcccatctatgtacattttttaaatattcttttataagaagaatattattctttttttgtaaacttgttatttttaattttaaatctgttaacataattgtcgatatttaatataaattacttatgaattaatgggttgaattgttccatcttccactttctatttctgttccaattttttgtaattgttttctgacataattgtcttttaaattatcgcttaatttattgtctatcgcatatttctcagcactctctaataattcacatattcgtttatcactttcaagcgaatgtatgtaccctgcatggtaagtaccagtagttctggcagcttctcttcctggatgtccagattgagttacttgagaattagcagtaccccatagagcaactccattttcggcatcattaattcctatgtgacacctttccaatacggctttggatctgtttacatattcattattccgattcaattgaacaatatgatgtggagtctgtccagcagcaacaggcctataggcattttccatagctttttttaatttataagcatgagataagcctaaaatatcaagtgctatgttagtagaattaacatatctatatattgctaaaataccagattttaatcctataggatcttgactcatgtaactaccaattcttggttcataatacctaaaacggttgtagtataatcccgattcctcatccacatattgcccttgaaacctgaatggacaatcaaactccattcctttatttacagtaatcacttttccataaatatctagtgtacaatcccaagttttgtttcctttttcatcgtacatctgaataggtgtacccaaataatcggacacaatagaatattgcttaccatcctgtatctttgctgttggtacaaacgtgcctgcttcgaacacccaggtggtaacatcttctgccggttcttttggaaggatgttttcctcttcgtccgattgtaagccaacggctttatagctccattcgtgtaaaggtacgtttccgtcccacacccagcgtgtgacctttccgaaatactgtttggcggtgcgtcttcccaacgcatcgtaacggaactccaccggtcttccgtccggacgtataaccttctttagcataccattggaactccactcgtagagccatcccgtacctgtagccagacagcggacgccgcgctccttctccatgcgcttgcggtcataccttacgcccgtttcctgcaaccgtttgaactcacggaaaatgaggtttccttcgtcgtcgtagtgatagaaacaatccgggtcttccaacagttttcccccgggaccgtatttgcggtcttttttgtccggtgtctcaaagaggttgcccacgaagtccggtacgcggtaaatcacgtccgtttccgagccctggatggtttcctgccggataaggaagtcgaaacggtcgtagtcgtagcgcatgaccgttcccgtcagctcgttctccttggcgagcaaccgattagcgacgccccactcgtagcggtacgccccgcgctcgatgccgcccgcgcggacggacttgcgcacctcgcgcccgaaacagtcgcgctcggtgctgacggttacgccaccggagaaggtgcgctgcacctccagccccgtattgtcacgcacccacgatgcctgccagctctcgcctgcctgcatggtctgcaggttgccttcccggtcataagtgtgacgaatgtccgctcccagactgctggtgatgcgggtgcagttgccttcgctgtcataggtacggctgacggtgtattctccctgcctttcctctgtaaccagtcccgtcttcctgtcacgggtgaattccagcaggttctcgctgtgtttcgccctgacgagcatgccgtccttgtcatacgtgtagagggagacctccccgtcatactgttcctccttcaggatattgtccagtccgtcgtactggtattccgtccattttcctccgggacggttcacacgggtgacacgacccgcgccgtcgcgctcgtactcacgccgcagaccgtcgaagccggtttccgtaacgacctgtcccagcccgtccagctcgaagaaatagttgtcgcccacctcattgccgatgcgccggagctgcaactcgctgttgtagccgaatgtaatccagtgcctgtcctgctcgcggcttttcaacacccccagcgccccataggtgaacctgacctcgcggatgttgtcgctggcatgtaccatgtttcccatggcatcgtactcaaaccggtgcacgttgccgtccggttcttccagccgtatcaggttgtccgcccgattgtaggcataacgggtaacattgcctttcacatccaccgcctgcacaagccttcccctgccgtcgtactcccaccggcggaacagcccgttggggaactgcagcagctccaggtcgtacctgtcgttgaacgtgagcgtgtaaacccggccctgtccgtccgttatggtacgcaacacgcctccctcgtagacatatttcacagtttctccacccggtgtggtccggctgacgacccgatcctgtccgtcatagtcccatgaaagcctctttccgcacggagtgtagagcgagaccaggttgcggttgttgtcatagtccaggaaggtgtcctccccgttctcgtccgttatccggaccggcagtccgaactcgttgtaggaagtcttgcgggtatagccttcggggttgaccgttacctccagctcctgaaagctgttgtactggcggcgggtaattcccccgttggcatccactatcttgtagatgagtttgtcctcaccgtaataatattcggtttcggcattttccccattgcggatatgggtatatcccttaccgtaacggatgaaatattccatcacgcctccatcgccccatgtatgcacacagcgggcattctcacccttaccctcgtattcccaatggaaggacatacccccttggttggtaagctgtaccagcaggtgcccgccggaatagacgaaatgcttgctgacatccagcgcgtcaatggtttccaccatgtcgccccggtcatcgtaacggtagcggaccagcttcacctcctcaccgtcctgatttacggaaacgcagagcacccgccccgactcgtcggtttccactttcaggaattctccccgtgaggatatgattcctgccagccttccccccgaagcgtattcgaagcggagccggaatccgtccttcgtggaaatgcccgataccatgcggtaaccggagcggttttcaggaccgtcaaaacggtattgcaacccccggatgtccgtaagcaggtaaccccggccatcgagtgtccaagacaactgttccttgcggtcaaaataggaatctccgggtttcagtacgggcaggaaagactcccgtccgtcagcatggcggaatgcgaacgccccttcctccagctgccgtattcccagattgtagctgtggtgccagttgtatcccaacggaccgtccacggcggcatcactgtaataggtacgttcccatacgacgggaatcggccccggaagctcaaagtccacattggtgtgatagaccctgcccgtagcagcgtccaccggctcgccgaaagtcttgcacttgatgggctggagaatgtccgccagcctgttcatgccttttttcctcagcctgtcgattaggttttggaagcggtcgcctatcttcttccacatcttgcccaagcctttcagtccgaacttcatcgccagcgcaaatacatcaatggtaggcggtcctcccacaagcacgggatttcctacggatgtgatggtggagagcatggaagtgggggcaagcagggccttgctcaccttcctgggcttccccttgcggggaatcgtcggtattcccacaatgttgcatgagagtgccggatgtgtgagggaggaacagggcgcaccgtccgccaggacagtggaactgcccatccacatctcggactcggacataccgctgaccaacggggccggatgcaatacaaatgccggcagatgcacgatgccgatacctgcctgcgcaatccactggttatgcaccttgaccgacggagccatgctcttgaggatgttgcacgccactccggccactccatcagccgcaggcggcatggcagccgccatgccggccatgaggtctgccatgaggtcgtacaccttgcctacatgaggcacaggcatgatgggagagggaggggtaacggtaggatgcatgtctatcccgatggacaggtcgccgaacttggcgacaggcatacccggcatggaaggaaggattccgcccagacccgcctgaatctcgtccaaagccgccttggaggctgaaaaaaggtcggcaaagccccgtctgacgctgctgctaccggcggcgtcagctatattcttgaacacatccggcataatgaaactttttgattcttgtttttaaaccgattggtcggtctgctttttgcaaatgtatcatttaaaatcaaaaaagaaaaacattctcctactattttctatcaaaaatcataagacaatccataaaaggcaattgatttcaagtcatgtatcaaaaaaacgtcgtatatttgcatctgttgaagaaaaaaggagagtaaatggactttgaaggagaatataccatacggacggcttccaaccagcagacatacgagccgaataccgtatatccggacgcagtgctaaatatagcccgcgaatcggcttccgtgttccaactgaagcggaaatgggaaaaaactcctccgatgctgaatctgacccctgattttcaacggggactggtatggaagaccaaacagaaaagcgagctgatagaatccatactgatgggtattcctctacctctgatttatgtgaaggaagatgagaagggagtgtatcttattgtagacggcaagcagcgtctgagcaccttgttcagttttatcaacaatgaatttgccttggacaaactcactatcctaaaggacaagaacggttcccgattcgcagatttgactccgttggagcagaataaaatagaggactgttcgcttaccttgcatgtgattaaggcacctaccagtgaccgggttacctttgacttgtttgaccgggtgaaccgtggcgggacgcggcttaacaatcaagagatgcgcaatgcgctctatcagggcaatgccacgaaactgatcaaccggctggccaagaaagaggtattcgttgaagctacagaaggttccattccagacaaccatatgaaagacaggtatctggtactccgttttacggctttttatttgtggcagcagcatatcaccatagacccggacacccatgagcctctggattaccgaagcaatgtagaggattttttggggaaaacgatgcgttttctcaatcagctggagccggaaaacggtttgtttaaagaactggatagccggtttacacgtgccatggagcttgccatacaactgcttccgtcaggcggcttcaggctgccttcgttacccggcaagaaacggccgataaacatggctttctttgagagtttcagttatcttctgtcaagattgaacggagaaggggaacaattccatcgtcaggttcaggatacttatatgcaattaatgtgcaatgatgcctatctggattctctcacacgctccgtggatagcggaaagcagacctataagcgttatgaaattatcaaccgacttattcatgaactgaatttatgctaaacaatctgactgtcaacaattataaatgcctggtggaatgttcgttggaattaaaacctctgaacctgttcgcaggtccgaattcatcgggaaaatctaccgccctgcaagccttgctgattgcttcggataacgtgacggagcaaaaaggcaaacacggtctgaagaaccggagaacagaagcgtcgaatttcaatgatgtaaggaactttgtgaccaatgccaagtcatacgaaatctgtatttcgtatcatggagaagatccgacccggctttgttttactccgggcgatgactcattccaaaccacttttgtggaacaatcggctgacgcatctccgaacctgctgggagttctcggaagcgagaacctgctgtacctgcctgccacacgccccggtggggcatatatgcatcccgttaatcccgattcggaaaacaagctggggcgtaacggggaatttgtgatagactattacgccaagcaccgtctggatacgctggatgccgcattgatcctggctcccggcactcaaaccctggaaggtcaggtgaattatcaactggacaggctgaccggttaccggctggtggtggaaacagtaggaagcaatcattacgtaaaatatgaaacgcgcagcggcaaacagcttctcccttaccatgtcggtaccggagtaagctttatgacggaagtcatcatagcttgtttcgcgaccccgaaaggcggcatggtgattacggagaatccagaaatccatctgcaccccaaggcacaagccgacctgattgatttcatggcaaagatagcgaaagccggtgtgcaaatcatcatagagagccatagcgaccacctgtttaacggtatccggcgcctgatcagtcaggaaaagttggccttgtctgacgttgccgtgtacaacttcagacaagacgggaatggattgacccatgccgaacctgtggaatttaccccacagggaggaatccaatcctatattcccggcatgtttgagcagtttgatattgatttggatgccattttaaagctataagactctatggacggtatcattatcaatgaattgtcattgaacggacagtttttggacagccgggatttctggaaaaacggaatgcctccgtttcacaaggcattgcaggatgccctttcacatggagtgggatatctgttcaaacaaggaagtttttttgctgcgcaagccactcccgacaagactttacacgatttgctgacagcaccggaaacccgtatcatcgatgaagccaggctgtataaaagtacattggcacgtgccatctgtaatccgttttgggatgaagctccccaacaggattccaatgcccaatattcagtaggtgaaaccgatgtatccggcagttcagttgccgaagcagcagcccgctcggtttgtcttctatcatttattagatccaggtatgagaagcatctggttgccgtaaccaaagatgaagaaccaatcgaggttggtaatatctggaaagagaagcaattgtactctatcttgtttgaaaggggtgaactatctctcgaaaagtatattaccattcgtttcagtggaggcaagcttgatttcagccttattgatgacacgctgggtttttcccttattgacggcgagaatcagaacgaatttattgattcattccataaatttgaggagttggactggagtgccattgctacagataatggattggattataaaccgtataacaagaacaagaaaagcaagcgctatttttcggatgacctatggaagaaaggcattaaaaagttcagaatcactcagcggaacaggtgtttcggctatgtggagaatggtgttttttatgtgttgaggtttgatttggaccatgagctaagcgatgttggataatgtttatagccccttggccttatttttataaaaatagaaagctgtgcaaatttataagattggcatcttgcttatctccatatactttcagtcggaaattcaagaattacaaatcctaatacttataaccggcggatttataatccgccgggacgggtcttgtaacttaacaataaaggtagtgttccaataattaatatgtaatacatttgttttgatactacctgctattgtactaaaaaattaagaatactcccaatatgcaacaaaaagattttcaatattttcattttctattttaccatatacatatatacttccactcataaattctgagatgcctctcattccaatttcgttgatttgaaaaatgaaatcatatccatcttttgttacttttccatcattatccaatccccattgtattggtatagcttttcctccaaatttgataacattatttttttctggcccatctctgtcttctcctatttcatataaggaataaatatcatcaatttcgggatgtttaaatttagtacaattactctgttcgcttatttcatgttcaattagtaatactttgcaattaggatatgaattgtattctaaggaagtatcaaaatctggagtaaaaatagagtattgtctttctttatttaatgggctttgcagggttaagtagaaataatatttttccatattagggaaagaaatattatctaatattttaggagcattacccccaacccaactattacagttttctttatattcacatatatcataatataaagcgtcttctctagtctttaatatcttttttatgttcataactattttatgatttacatgttattaaattatttgctttagcatgtgctattgcatcctgtctgagtttctcgactaatgcggttgctttttctttcgcagtttttctatccatgccatcagctattaacccttccattattcctctacgtgttaaagctgcatttttgtttatattttctagtgcagattgtcctttcaagtttttacctttcatcccatatctattttgaagagcggtaattctattgtgtatacccttttctcttaatgcaatagaagggttttctttagaaattaaatcaactcctctatttttacttgtgggaagtttattgttctgttcaagccatgcgtgttgaaggagttcgtgtgctgttaaattgtcaccaatattcgccctactgctaatattgccataagtatcgatgtcaaattctttggctacaagtccaaaaatatcaatacaaagattgacatttttgacatagctataaaatctttcacctgcacttagtccaatagggtcttgacttatataattaccaatttctggttcgtagtacctaaagcggttgtagcataatttagtttctttatccacatactgcccttgatagcggaaaggacaatcaaattctgttcccttatcaatggcaagcacttttccatagatatccagtgtacagtcccatgtcttgtttccttgttcgtcgtacatttggatgggggtacccaagtagtcggacacaatggaatattgtttaccttcttgtatcttagctgtaggaacaaaagttccttcttcaaatacccaagtggtaatgttttcaatcggctctttctgaaaggattctcctttttcatctggttgtatttctgtagttttgtatctccattcatgtataggcacgtttccatcccatatccaacgtgtgaccttcccgaagtattgctttgccgtgcggcgccccaacgcatcataccggaattccaccggccttccgtccggacgtatgaccttcttcagcatgccgttggaagcccattcgtaaagccatcccgttcccgttgccagaaaatggataccccgttccttctccatacgtttgcggtcgaaccttacacccgtttcctgcaaatgcttgaactctctgaaaatgaggttcccctcatcatcgtagtgatagaaacaatccgggtcttccaaaagttttcccccggcaccgtatttgcggtctttcttatccggtgtctcaaagaggttacccacgaagtccggcacacggtaaatcacatccgtttccgaaccttgggtggtttcctgccggataaggaagtcgaaacggtcatagtcgtagcgaatgaccgttcccgtcagctcgttttccttggagagcaggcggttggcgattccccattggtagcggtaagcccctttctctatgccgcctgaccgtaccgacttgcgtatctccctgccgaaacagtcgcgttccgtcttgacagtcacaccgccggagaaacttcgctgcacctccagcccggtattgtcacgtacccaggatgcctgccagctttcacctgcctgcatggtctgcaggttgccttcccggtcataggtatggcggatgtccgctcccagactgctggtgatgcgggtgcagttgccttcgctgtcataggtgcggctgacagtgtattctccctgcctttcctctgtaaccagtcccgtcttcctgtcacgggtgaactccagcaggttctcgctgttcttcgccttgacgagcatgccgtccttgtcatacgtgtagagggagacttccccgtcatactgttcctccttcaggatattgtccagtccatcatactggtattccgtccattttcctccgggacggttcacacgggtgacacgacccgccccgtcgcgctcgtactcacgccgcagaccgtcgaagccggtttccgcaacgacctgtcccagcccgtccagctcgaagaaatagttgtcgcccgcctcgttgccgatgcgccggagctgcaactcgctgttgtagccgaaggtgatgtggtgccgttcctgctcgcggcttttcagtacccccagtgccccataggtgaacctgacctcgcggatgttgtcgctggcatgtaccatgttccccatggcatcgtactcaaaccggtgcacgttgccgtccggctcttccagccgtatcaggttgtccgcacggtcgtaggcataacgggtaacattgcctttcacatccaccgcctgtacaagccttcccctgccgtcgtactcccaccggcggaacagtccgttggggaactgcatcagttccagatcgtacctgtcgttgaacgtgagcgtgtaaacccgtccctgcccgtccgttatggtgcgcagcacgcctccctcgtaggcatatttcacagtctctccgcccggtgtggtccggctgacgacccgatcctgtccgtcatagtcccatgaaagcctttttccacccggagtgtagagcgagacgaggttgcgattgccgtcgtagtccaggaaggtgtcctccccgttctcgtccgtaatccggaccggctggccgaactcgttgtaggcagtcttacgggtatagccttcgggattgaccgtgacctccaactcctgaaagctgttgtattggtgacgggtaattcctccgttggcatccactatcttgtagatgagtttgtcctcaccgtaataatattcggtttcggcattttccccgttacgaatatgggtatatcccttgccgtaacggatgaaatattccatcacgcctccatcgccccatgtatgcacacagcgggcattctcacccttaccctcgtattcccaatggaaggacatacccccttggttggtaagctgtaccagcaggtgtccgccggaatagacgaaatgtttgctgacatccagcgcgtcaatggtttccaccatgtcgccccggtcatcgtaacggtagcggaccagcttcacctcctcaccgtcctgatttacggaaacgcagagcacccgccccgactcgtcggtttccactttcaggaattctccccgtgaggatatgattcctgccagccttccccccgaagcgtattcgaagcggagccggaatccgtccttcgtggaaatgcccgataccatgcggtaaccggagcggttttcaggaccgtcaaaacggtattgcaacccccggatgtccgtaagcaggtaaccccggccatcgagtgtccaagacaactgttccttgcggtcaaaataggaatctccgggtttcagtacgggcaggaaagactcccgtccgtcagcatggcggaatgcgaacgccccttcctccagctgccgtattcccagattgtagctgtggtgccagttgtatcccaacggaccgtccacggcggcatcactgtaataggtacgttcccatacgacgggaatcggccccggaagctcaaagtccacattggtgtgatagaccctgcccgtagcagcgtccaccggctcgccgaaagtcttgcacttgatgggctggagaatgtccgccagcctgttcatgccttttttcctcagcctgtcgattaggttttggaagcggtcgcctatcttcttccacatcttgcccaagcctttcagtccgaacttcatcgccagcgcaaatacatcaatggtaggcggtcctcccacaagcacgggatttcctacggatgtgatggtggagagcatggaagtgggggcaagcagggccttgctcaccttcctgggcttccccttgcggggaatcgtcggtattcccacaatgttgcatgagagtgccggatgtgtgagggaggaacagggcgcaccgtccgccaggacagtggaactgcccatccacatctcggactcggacataccgctgaccaacggggccggatgcaatacaaatgccggcagatgcacgatgccgatacctgcctgcgcaatccactggttatgcaccttgaccgacggagccatgctcttgaggatgttgcacgccactccggccactccatcagccgcaggcggcatggcagccgccatgccggccatgaggtctgccatgaggtcgtacaccttgcctacatgaggcacaggcatgatgggagagggaggggtaacggtaggatgcatgtctatcccgatggacaggtcgccgaacttggcgacaggcatacccggcatggaaggaaggattccgcccagacccgcctgaatctcgtccaaagccgccttggaggctgaaaaaaggtcggcaaagccccgtctgacgctgctgctaccggcggcgtcagctatattcttgaacacatctgacatggtgagaattttttagaatgtgaaaaagagacaaccgggtgttccaaccggcacactccggctgtccctgtaaggacttacctatgcatcctgtgcatagtcgctgttccagtcgttctcgtcatccccttttgtaccttccaacttgatgacaaaactctttgccgggaaataaggagtcaggtgaatgtcgaggaaaatacggtctttctgcttcggatcgcgctcgaaacgaagaatcttgaatttctcaatcaagcgtccgggaccctgtatgctatccaaaaacttgctgatctgaccacgcaaatccctttccgccttgctgttccagttctcaaaggcacggcggttgaggaaatccatcagcactttcgttacccaatcgaacacacggactacggaataggtctgcaatcccaagttgtccccgttgaacaatgtcttggcagagaaagccatcaccttgccgtattccttcaccatcggaatcaggccaatcttctcgatttcggaaatctcgctttttttcaggttgaaagcaaccccgtccacctcgctcatggaaccatacttcttaccggcggtaacctgtgccattaccgtcttgtacacactgccggccaatgccgcagaaggaggaatcagcaagtcttcggtttcgcccagttccgcatagcgtccccgtcctaccagatagttgcaggtcatacatacgttggacttgtacacatcgcctcccgaaagattggaatcaaagaacatttcaatgacatcatccggtttttccagatcagcgaaatccgtgtaaatcatcaccttgttgtcatgcgcaatctttgcccatttttcaacaaccttgttggaacccaaatatcccgggataaccagcagggaatagttggtacgcaagtccaaacggtcataattcgcacgaagctcgttagcaatggcatcgataaagaaggagttgtccaaatcggtaagctggctcatcgaagcgttcacaatggagatattcttgatcttgtcggaatccgtattcttgtagaagagcatgaccgtgcggtaggacttctccaactgcctgacctcttccaccgctttcagctggttctgggatagcagaccggacaccgccgcagacttcttctggcacagttccaccatctcgctgatggatttgttgcctttcaacatatcgacccacatctcaagccgtttttccagttccttgcgctcagccgcccgttcggggtcggaaaggaatatgttccgccgtgccttgcgctccggattcatgttctgtatgccgtccacggaagattccaagacattgaaaccgccaaacttagccagaatctgcaattcagcgttcagatttctggactgcgccacagcctgttgctgctgtacggctgcttctctttgtgtattctgttcgctcataactatcattcattagtggggttagacttctcattgttcttcaaatcgtccaaaatggcagaaatcgcattgacaaacgctccacgtgtctccggattttccagcacccgttgcagcaccttgttggaacgcaacgacttctccatcctgtccgcaaactgcttttccgcattcaggccggacaagaatgaactctgttccgtcattttcctgacagaaaaatcaccgacattgtggaaacggaaattttcctctacgggagcaccgtccgcatccgcgaactcgatatctatttccggccggaaatgtgcaaagacttcgtcaatgttggtcagaccggcaaccacttcgggagccaccggctcatccttcgtcagctgttccaccaataaggttcgattttgtggaatttccgcaataccttcggaagcgtcaatcttcacttcgtttccgccgattccataattaccaagatccatacttattcaattttaaatttaaaatatatattaattaaatctcgctcaactgaaaaaacttccccttcttctggccttcgcctgctgcatatccggattgtccaccagttccttccaatcctccccaatccattcgcagagctgccgttccaatatcccgacatcaatcggagcacgaaccagccttcctgtatgaagagccagatacgccgcataaacgaacgtggaactccgcctgatttcggcagaaaggtagctgcctcctgccagggcaagcaaaaaatattcgaaagcctgttccatctttccatcctcatagcgcaggaaaccacacatgcgatagccttccatgacataataagggtccttttgcatgacggcttttttagccatcatgtcatacaaggcaaccgcttcctcccgttttttcccggctgtcagaatggccgctttcatggaaacagccattttccaataactatatcctgccgtttcaccgccctgcatcgccttttccgcctcccggacggtttcgtcgctgtatttcatgctatgcttatattccctgatagcataacatgcctcggatgcgataagcagagcggaaatccggatattcgtatcctttatttcctgtgcaatatccaacagttttcggatttctctgtccaataatttccaatcctgcttttgtgtagaatccatgacaaccgtaacctgctgcttgaaccgattttcaggtgcaatcaggtcgttaccgctatccgaccgtgccatccggttatgcaaagccgccgccatatcgaactgcgggcgtatgcaaaccacttcccgagactcacccagccggatactcctgttctttttcaagtcaatggttgtcatccggattccctgcgggacaccttctttcagcacattgccgaaccatcctgtccgggaataccccctttcctgttccggaggaaagtacagacagaaaaaggcatcatccaaccgggagatacatgccttgaaacgcaacatctctctccacaagttgcccgccgtatgctcaaccgacacatcaggaatgtattcttccttcagcagcccgtcgtgcctcagagccctgagaatatcatacttctcctcaaccttttctgaaaaccaacccgcatattcctgccagagctgttcagtgtattcctcgtcatcccccctgtacggcgtatcaaaacgaaagaatatgtcatcgaactgccctaccggagaacgttctatttccagaaacctgtccaccaagtccacatcattctgcccgacaatccatacagacagtttccagtccctgttgccgactatgtccgcccagtaatcgactgctttgtaatattcctgtatcacagatgcagatgctcccatagccaaccgaattatgagttaaactttactattcctcccgaaaccgttacgtttccctttccctctatcatcagatttacaccgttgaccgttccgttctttgcagcaacatcgtaatcctttgccgcctcctgtttgatattggtaccgctgctgctaattatactcttttcgctgctgagcaccatacattcgttgccggacagcaatgttacacttttcctgccttcgagagcaatggtatcggcctgcaagcctatcgacttatcatccattacgatgaccgattccgcctcgttggtaagggtaatgcttcttttcgccatgacggtaatggcatccgtgccatccaatatgatcagctgttttcccgtctggtcggtaataacgatgcttcccgtctcatcgtcgaaaacgatggcattgccgctgcgtgtgataatgctcttgaccttgttgtccttgtcccctcctttacctgaaccggaatggaacaccgatcccgtaacataggggcggtccgggttgccatgctcgtagcttaccataacctgatcgccgacttccggaacaaatacccatccgcgattcttggaaaccgcaccacttactcccgcattaggagtctgcaccctgatccaattggttgtcttgccgtttttctgccagtcgaaagccactttcacacgtccctgtcccttgtcgtcgttgttttccttcaccgtagccagttccggcaacgccaacggtcgcttcacatcgggaacaggaatatgtaccgtaccgtccggcacaccgacaaaactattggagtaatgtccgtcacggcgtacctcatgctcaatcccgacaatacggaacttgcctaaaggaggcagtttcatcctgtcagggaaagaaacatcgatgatttcaccaatccttatccggcaagtctttcctatgcctttgatgttcagaagattggcaccagacgcattctttacaatcctcatctgttcgtccagttccgccttgtccgttacatgggggtcggcagccgaggtcgtttttgcagtatatgccttctcagagcagctgtgtgcaatagactgaaggtcgttcatgccatccggtttggcaggcgtatccgcattatgctgtttgttctcctgcgctacataatcgtatcttgcggatttacccggtaccagattggcaaccagacgtacctcctccaaatccatgtcataaacaatcttctccgtattgtccctgtcaggcttgccgaaatacactttcgtcccgtcataatagaaccactccccataaagagccgaaaggcgattcataaagtcaaagacactctcgttatactgcgccatgtagggtatgggcgccgcatacttgggattggaaaccaaattgacctttccatactcctgcgtcacctcctttattatggtagagagggactgatccatccaagaatcgagtgtcctgttgttctcatacagtatcgtagggcttgttccgtgaatggccactccgcctgtctcgcccatgcttccaaccatttccacttgagtgatgattccctcgaagtcataactttcacccgtctgcctatggacaaatgaaatgctggctgtctccccgatgtagccgatgaatttttccggggtctgttggaacgtattgttaggcgacagataattcaccaccacagtgaaggtgtgatgccggttgaaaccctgacggagatgcagtgaaacgaatttctgttcttctcctttcacggttactttagtagccaccaaattcagaaaacttgctcccatactatcttaaactatgattttaaataaataatccgactggtcggtatgttttttggtgccgaaataaccggaattggtatattccggcaccttaaaactttgattaggaaacaaccattagttgttttccggccaatcctgtacaaatgtagcctcgtccatcttcacggtctgtgcagaaatggcgaacttgattgtcatcggataagggttagccacattcagtgcctcttcgtaatccaccacataaccattttcgaacaccaattccttcattttggcatcttcatccgctttcttgaagacgatgtttccgtttacgggctggtactgcttgaacatcttatccagcacaatggtatcgggagttgattcgatttccacatagattgtgccaccataaatgtcagatgccggacggcctttggggtccacatcacgattgaacttaactctccaggtcagtacatcaaactctcttgagtccgaaaacttaaatgacgctttaaatgccatattctcaaagttttaaattaaaaaataagttgattttgaaatatccggtcaaaggaggcctgctacagtcctatctttgtccttcaatttctgcgcccaatatatggcattttctgaaaactacaaagaacttttgatgattttttcttgtttttgccgaaaatatgcccataagcataaaaaaaacactgccaacaatagccgaattattttttttgccttatatttgcaatgttctcctgcgcaatttttaaatcttacgattatggaaacaggagttggtttcatcaatcttgatgattctgtaaaaattgcgcttaacatagcacttgcagtggctcgtgaaaatgcgaacgagtgttatacaccctcgcatttgttgaaggctctacttcataaagatgtagggttaagagattttataataagtataggcaaggatttaggctatctggaggaatgggcggacgtgtatatcgaacaatgcccgaaatccacccagttgtccgaaatcaagccttcggaacggattgacgccgttttccgtgccgcagacgatgcacgaatccagttcgggctgttcgacatcaatcccatctgtgtgctattggcactggcaaagcccggtgtcgctttttccagcgaccagctcaggtctttccccattctggaaaaggatatccattccatatatataggtaacgggcagccggcatgtccttctgccactacggagaagtcctatgccccgacttccgcctcatcctccttcttgggcaaatactgtgtggatctaaccgaagatgcggccaacaagctgcatccggtcatcaaccgcgaccgtgaaaaccgtatggtcatggagatactgggaagccggagcaagtccaatgtcctgattgtcggtgatgccggagtaggaaagacagcactggtttacggacttgcctgggagatagtcagccataaagtgccctcgtttctggaagaaacccgtgtatttgaactggacaacgcctccctgattgcgggagccacctacaagggggaaatcgaggaccgcctgaaaaacatcctgaaagaattgcggaatatcgacaatgcaatcctgtttattgacgaaatccatgtattgctggacaaccgacaaggaaataccggtgcgggaaatgtattgaaatccgaactgtcgcacggcgacctgaccgtcatcggcgccaccaccattgacgaataccgcaaaatcatcgagccggaccatgctttcagccgccgtttcgaggtcatacaggtaagcgaaccggacataaagtccgctatccagatgctacactccgtgcagaaacaatacgtggactaccatcatgtaagaatcagcaacgaagccgtagccgaatgtgtccgtcttgccaaacggtatatcaaagaccgccgtctgcctgattccgccatcggtctgctggacatgacgctctccgccatcaagatggtcaatgaaacaggaaagaagaatgtggagaccctgctatccgggctggatgaaatagaaaaggacgaaaaggaccttcaggaaaagaccgaagaactgaaaacgctgcttttcgtaatgcacaacaaattaagccccatccttttaggagtcatacccgatgaagcggatatccatgaattgcaggagtatgaagaactgaccggctatctgagaaacgcattgaacgtcctcctccaatttgcagagaagaaaatagaggaggtgggtatctatgaggtagccgccgttgtcgccagcaagacaggcatccctatcggcaagatacagtcgcaggaaaaggaacggctactcaatatggaagattatctgaggcgacgcgtcgtcggacaggaccaggccctgaagacattgacggatgccatcctggaatcccgtagcggcatgaacaagccgggacagcccatcggctccttcttcctgctgggacccaccggtaccggcaagaccgaacttgccaaagcactggcggaagccctgttcaatgacgagaaatccatgatccgtttcgacatgtccgagttcaaggaagaacactccgccgccctgctgtacggagcgcctccgggatatgtgggatatgaggaaggcggcatgctggtcaataaaatacggcaacagccatacgccgttgtcctttttgatgaaatagagaaagcgcacccgtccgtatatgacattttcctgcaaatcatggacgagggaaaactgcatgaccgtctgggcaaggaaggggatttctccaactccatcgtgctgttcacatccaatgtaggaagcgagtggctgaccaagcaacttgagtccggcaatgttccgtccaccacccagatcatggaggtgatggggcagtatttccgtccggagtttctggcacgcctgtctgaaatcgttccgttctcccccatccgcgaagacatactcctgaaaatattcgacatacagttcaacggagtcagaaaacttctggacaagcagggtatcggcataaccatcaccgatgatgcccgtaagatgcttgcacacaaaggattcacacccaaatacggtgcccgccaagtggccggtgtaatccgtaactatctgcgcagaccgatttcacggcttatcatcaacgaggagctgggcaaaggaaaaagtctggaggtaggtctggacgaacagaatgaattaacctggaatattcaccaataatcaagtacactatgtttggatataccgtattcttaaagataggcaacctggctgcctcctcactgaccgacatgtacaaggacagctaccagctcatcggttgcgaattcggatttgcccaagggatagatatcaaaggacaggcacagaccgaggtaaaaggcggcacgttttatgtaacctaccctcatcttcccaaccgtgacatgatccagtggatgctggatgcccgtaaataccagagcggagccatcgtagtccatgacaaccaaggctccacactcgaaaagatactctttgagaaagcgacctgtgtggatatggaaatcagctatatccggcagggcaaaagctatattgcgaccaaactgaccgtacaggcacagaaactggcattcggtacagaagagtttgaaaatcagtgggtgttttaaaaacagcagcgttatgggactttttaattttccgcaagtggacagcaacgtgaatgtcatattcagcgttgacggcgacgaatatgcagtggaacagttcaaaataggttttcaccagccagtagataacctaaagaaccaaccggaaggcgaagtgcgtggaggacgaatcatgataaccctttcgcagacggtgaaaagcaacatctacggatgggctgtgaaaccgtgggtgaaaaagaacggggcagttctgttcaagactggaacgtccggaatcgtgtttgaggtggcgtttacgaatgcatattgtgtcaatctgagacgggttatagaggctttgggacaaggattgtcaacaagtctgattctatctccagagagtgtaagcgtgaatggtattgaatttgataatcggtgggtaaagtaatgggcgatattctgaataatagaataataactctagaggattttgagtttctaaaatcaataggagttccatatacaggttatgtcaagggtattggatatacctgtcctgtgtatatgccagcacaggctttcaggattacagatggtaatgtgcaatggagcagttgtgagttacaccctcttttttatcaagctatagatgatagtccagagcgcatctttttgagcatgggatacactactgaagatataattgaaagaataacttatgataatggtaatggaaccataactgttgctgtgggaaaccggtctgtaacttttccaaaagaacaaggtaaggttaatgtgtatttgaatcaggaaggtggtaattattttatttatatagaagctacagattcaaaaggaaatattcttttgagtgattcaaaaacgattcgttcttatatacatgagaaaggaattaaacaagattttgacattacagatggagtgggctttaataaggaaattcttgataatattaatacaggaattggagcttttggtattgggttaggtgcgaaaactgaaataatagattatggaataagaagttttcatggttattcttggaagcagtttaattcactcgataaaaagcagcagttacttaaagaggctcaagcaattggaaaaaccgggactaaatatttaaaaggtatgaaaatgcttggaaactggagttcgtatgcttctgctggttattctgtttccttaatatttgtagaagatggaagaacattggaaaagaaatttgttaaagcagcattagatgtgggatttacctatataggtatattgggaccatggggatttgctattagttctatttactatttggtggatacagctacagatggctttggatattttaatgaataaagttatgcataaaatcttagaatatttgttttataaaattcaagtattgactcgatatatggacacaagtatgtatttaaatatacatgttccatttattatgtctacagtcttattattctatttggcagatattgcaattatatactattatattataatgggatattcaccacaaaaaaatccaagtaatgtgtttttggtggttttcattattatgattttattatggagtagtctctatttttattatcggtataaacatagaaatgaacgaattatggaaagaaaaatttatgaacatagttctaatgtatgggcatatcttttcatatttactccttttattgtattattaggatttgctttattttttagggtgtccagttctacgctctcgtttttggtattgatttaacaacttaagatattgattattaactataacactattgtttttaggtacaattttaacatacaaaaaagcatagctaattcattgaatcaatatattttaaagagatatgattatcagcactttggaacttgcatcatatcttttttgaactaaaagctggaacatcaaactggacaccctatttatttttttaatttcattgtttatgaaagagtataaggtattaataatttatacaatctccaatgatcaatcaaaaaagtcatttgaagaagaactggagagatacggtctggaacgggtcgggacgcaagatatctttgcccttcccttagaggaataccggacaaaggtacaggcattcaaagcctacctgcgagcctatgtacgcaagcatctggacagccaagacacggtactgttcgttgaatcacgcatgaacgaggaacggaccctgaccgccatgctgcaaaccaatctgatgagtgaagaagaataaaataacataaggatatgagtgcacaatcgtatatcaagttctggacagccgaaccctcggagcatgaagaagtgcaggcatacgacctgctgggctacgagtatgacttccggaaagaaaccactcctaacggaaaggtaaccgggaagacctacggcggtaaaatacgggtaagcattgccggatttcctacagaggaactcttggaatggatgttcaattcaagaatcctgaaggacggagaggtgatgaacacttccggcctgcccggtactcccaaagagatcatccgtttcaagggagcaaaatgccttgatttcaatgtgcattcaacaaccaaagagagccgtacctcactattcatccacttccgggaaatggagaccggcgattcgtgtcacttaaacttataatcatgaactggttcacttcattgttcagaaacaaaaaatcctcaatgccggatgaccgctacgtgatgcggctgtccgtctgccatgagacatacagcattgaagagttcgacctgcaattcaagcggaatacagaccgtgacggattgcctgaaggtgaggcatacggcggattcgtcacctgtaccctcagcgggatgccgggtgacgagctgttgagatgggccgcatacagccactcccatgaagacggcgaaatacggatctacctgaaggagcaacccgaccaacaagcggcatttgccttgcgctttgtggaagggaactgcatccgtctgcaacgcaaggttgaccgtatctccaattccagcagcatcgtccttctgtttgccgcaagaacactaaaattcatagacgaagaatttgaaaacgaatggcactgacaagtatggaaacaaagttttgcaaattgcccctggattttgaagccttgctcagcgaggatgtggaaaacagccgtcttgcatcctgctcggaaatcgagtccatcgaccagtttatcgaactgctgatcagtacggctcccggcgaacatgcctttgacaaggagttcggctgtgagatcttttttctcgactttgaaagcattgtctcacacacccgttgggaaggacaattctcggaatacataaccaaggcaattacccggcacgagaagcggcttacgggtgtaaatgtacgtgtcatcattgatgacaccacccgacaggacaatgtatttgatgctcccgccgtaaagaaacgtgtacaagtatatgtatatggaaccctggtacataccggagaaaaacggtgtttctattatgtaatctatttaggaccgatttcaacccgatgaaaggattatgagtacagaaaaatacaataaagagcaaatcagaaaccgtatgctgaaatacgctgcggctttctggggaataaaaaaggcggaaaacttcgacccggttgtcaagctcctgctggaagcattgtccaacgagatatatatgctgggagaggattttaccgccatcgagacaaggctgctggaaaagaccgcccgaatccttaccccggacatccttacctcaccctttcccgcacacggcatcgtacacgcctatcccatagaaccgtgttacctgataacccgggaatcgggcatgtattacgagagcgactcgcttacccggaagctatcgaccggaagcgtatcgttttatcccgcctgcgataccctgctgcacaaagccgacgtgaaatatatggtctgcgacgaccttctctaccggatagcccctaccttggagaagaccatgattgcccgtgcagagacaaggatgtctccgcgtaccgtctggttaggaatggcggtggatgaatccatttccgaccttgaagacttttcgttctatctagattttcccaaccttacggagagctatgaatatctgctcctgctcccctgtacggaatggtccgtagaagggaagacagtcgtgatggaagggggaatccatgaaaagacaaccatacagaaagaaccaacccgtgcctttttccaagactatgacgtaatgtccgtcatagacaaggaagtcatggatatttacagcaaacattttctgaaggtatcgcagtcctttccactcgacggttcctgcaggaaaaaccttccggacaccctgcggtcctgtttcaaagaggccgttctggagaagatgcaggacaagctggtatgggtgaagatacagttccccgcccatttcacaacggaagtccttgaagaacttcatgccggcatcaacatcgtgcctgtagagaacaagacgcttcacgaacagacgaccacccttgaggaaactttcagggtgatacccttgcgcacgggcagctacgaatcccttctgtccgtacacagcgtgaaggattctgacggaaagaactaccatgaactcctctattccgcaaaggattccacggaaagctatggaacctactccatccgcaaaggaggatgcgagcgtttcgactcccgttccgccaaggagctgctcggctatctgtccgacctgctggatgacgagacccatgccttcaatgccgtatcaagcatcaagctacaggcacttaccatccagatggagcagctgatggcgcaaatgaaacagacagcggacaacatgaacgagttcagggaaacaccttattaccttatgattgacgaattgtccggcaaggggcagattaccgtcaaatactggacaaccaactgtgaggtaggaaaccggatacaggcaggcgtaaacctgtcccccaatgccaccacttacctggacccgaagacactggctctggtcagtaccacctacggcgggaaacaagccccccaaaacagagaacggattgacatctacaaatacgccttcatttcgcacggccgtgtcctgacacagaacgacatagccagcttctgcaaaaaagaactcggagaactgctggtgcggacagaaatccggaacggggtggaaatcagcccgatgccgcacgaaggactgatccgaaccaaagaagtccatctgattcttggaacgaaactggatgagccttcgcaggaaaaacagataaaagacaatctgcgtaccaaactctcggcctgttcgccggacacattcaactaccggatattcatagaatacaataaagcataaataccatacttatgaacccagttacccaacatctcatttcatcgtacctgctgatgccgctgctgaccgtgattttcggaatcgcggcctattttatcgcacgcaagaacaaactgctcaacaacaaaaaactgattgcgtatctgctgctgtgcggcataatccttgccctgcccggcctgtccggattcatggactataacttcatgccttatgcctacatcctgctggtcatcctgtactggactgccggatattacaaccggctcatccttcgcaaagtgttcgcgtcaagcaaggaaatgccttctttcggcatccaatgcctgctgacggttacggtcatgcttctgggagccggactcttttccgtagtgttcaacctctgcaacgaactccagtacggcatctgggcctccacctgcctgctgccctttgcatttccactcctgtattcccaaacggtgaacagctatttcgacatacccattgaaatttataaagtatggaaatattcggaggaatatgacttggataccttgtacatcaaccgtgaacggagcatcgtaatggatgtggacatattccgcagggtggatgaccccgcatcggaacgcataaccggcaaggcatccgaggatgtcatcttcgggcagtggttccagcgcatgattgacgactgcaacctcaaatcaccgtcttcgcccatcgtatataagaatgaaggaggagcctattacgaatgggtattctataccaaaccgtcctttttcaagagacggcgctatatagaccccgacgttacacttgccggcaacaagctgaaaagacacgatgtaatcatagccaagcgtgtggcaaacgaacttataaagtataacgaatattaaatagaaacattatgataggaaaacagagccaaaagaaaaaatatccgctggtaaactgggcggacggaatgcccgtcaacaaagggcatttcacccaacaggaagaccactttacggaccggttgtgcgaataccagtcgtttcatctgaaccgcaatacctacggactcctgccattcaagaaaggagaaccggtttccggcgatttcagcattacggaactcgttacaggcaccttggaagtccgattgaaacgttgccacgcccttacttccggaggttacctgatagattatgatgccggtgaggatgacgaactcaccgccagtttccatatccctacagaagaggaagaagaaaaggacaagcggtgggatgtcatactgatggcagaccctttcgagcatcttccttcgggtattccgaacgagaaggaaatcagtccacgccagcccaatgccttacccaaatatgcgttgagcgtgctgccgagcggacagaccgacggaagcgagctgggaagacactttctgctgatcggccgcctgcgcaagaacggaaaccgctgtgaagtggacggaaacttcatcccgccatgcacaagcatgtccagccatccggacctgaaaggctactataccaaattcgggcaactcgtggattccatagaaaaagcttcgtttgacatccttgccaaagtggagaatgcagaaaaacagaccagcctggccaccaacatcggtatgctgtgccgccatgtcatgctgttcatatccgatatctacttctccttccgcaacgaggggcaatactattcaccgctacacttcctgaatgtattctccacattggctcaccgcctgtatgtatgcctgagtttcatggacaaggaagacaaggaggacctgctgaaatacttcaacgaatggaacggcatcactcccggtgcctacgaaggcctgctgagggaaaattgcgggctgctgtacaaccaccacaatatccgccaactgatggttacggcggaacgtttcctatacctgttcaatgacctgtggacaaccctcagccgtctggaatatatcggcaagcacaaggaaaacatcgttgtcgccgaacgctccagacaaccgaaagaatcgagcgagtcacgctggaacatactggactaatcccctataagcgaacggacatgacggaagaacaagataaaatagtacggtttgacgaacattcccattcattcaacctgccggataccgacttcaaggcggaagtggtggccagcggactgaaagaggccgggtatgatgcagagcgtaccctcatattcagacggggagacatccggcgcggattctcgaaagacatccatgacatccacccggaatattcccattatgacctgacggattacctgtatctttatgtgaacaggagaagcctttatgacgagctgcccgaaggcatattccacaagaacctttaccagtccgagaaaatatcgaaggaacaggtgctggacgaaatccgcatccaccgcgaagaggaatttttcgcccgccgtttcttcaagcctttcgaaatctccctggaccatatgctggtagccttccagaataaggaacgccgcattgacgagatgaacgtacatccggatttcgtaagcatcttttccggtcaatggcccgtactggaactgctgccgacccatctggcggtcatgcttatccatatgctggcctatatggaacagattacagcgagcctctccaaagccggcgagtgcatgaccattctgaccggtgtgcccgtgcatatcaagagaggagacaaatgcgtggtggaagtggattcctgccttattcccaaattgggaagctgcattctgggagacgacatggttctgggaaacagttttgccgacggcacctaccagatgctggtagaaatcggtccactgtccgcccgacggatggagagcttctttcccggcgctgccgacagtaaaatactgaatgcgctgacagaactgttccttccctcggacaaggagatacagatccgctacatcatccagcaggaagatgcccggttcaggctgggaaccccaaccgaacaaggcgcctatctgggtatcagcacctatttatgaatataaaacatcatcctatatgaaaccgaaaaacaacacagaagtaaggaaagcctatctgagattcgcgggctatctgacatgctgcaccatccttgcggtaagcatctttgcctgtttcctgaaaacctccggcatagaagtaaagcgaatcacggagcaggcactggaatatgaccatatctatgccaaagagctgtccctgtcgaacagcatggactccatctaccagtacatgaaactgatgaacacttcaccgcaaataaacgacaagctcctgcaaagcgttgtcagtacgcgcaagatgaacctgctcaaatatgtccaaggcatggacaccaaagattgcaggctttacaggcagctgctggaaaacctcaacatcttcctcggggtaaaagactccatccgtctgctgaatatccaggaagagatggtgaagaaagacctgatgcagtgcatccaagacaactggaaaacaaggcgtaacctgaatgtgggttccggcggcaacaaacaataaaacggaaagccatggacaacaacagaaagacaatgaacaaacgggaaatattcatgggacatgcctatgtattcctgttctttttcctgacaaccgtagcgtgttgtctggtaatcttcatgtggaactcagatttcaagatgtttgaacagaaagagttcgtaaagatcaagatgaaccgcatcaaggatttccagcaggaacaagcggaaagccagttgccggtggactccctgttccgtaaaatagaaacatttgaaccgggcgtttacgcccagtatgaagaagacgacatccattatctgataaacaacctgcggaacacatacgaaaggaacagctgggacaagcgatacaagctgttcatgcacattgccgacttttatgccatgtggctgtccgacaggaaacagctatggagtatcggacaaaacataagtctgttcaaagccaatctggaggagtgcgagataggcttgcagaaaaaggaggaagacttgcgctcaggaactaaaaacaaatgacatgggaaaaatttataccagaaagattctgttcgtaatcgcagccatgctgctgtgcatccttgtcgccatactgatccggctgttcttttccagccgcaccgtgcgtatgacactgacccccatagaggtggaaaccggagaaacggtccattatgcagacagcacccgcaacgcacgctcctggctttgggaattcggcaacggggacatatcacacgaacggagcggagaatacgtgttcaagaaaccgggacgctaccaagtgcgccttcaagtggacggaggactggaaaggaaacagatcatcacagtacacaggagccgggatgattacggaagcgacgagcttgtcaggatgaaagcaccggcaaccgcctttcaaggagaaatcgtatctttcaaaggatacggtccgtcgaaagaatggcgctggcagttcggagaatccggaattgtcgattcgcgggagcagaatccactctacgcctatacagaacccggcatatacgaggttctgctgactacggagaatacccaatatccggtccggcacaccattgaaatccttccccaatatacggagaacgactcgacagacgtgcttgtcatcatcggcaatgacatccgtgaacacttgcaagccatcgtggacggcaagccgttcaatacccattacaattatatcctgaagaaatacctttgcggaaatccggacatagcggtaaccgtcaacaacagcaagaagaatgatttctattcctattgccaaggactgaaaatcatagcacgcaggaaaacccttatagacgaggtgttcgtcgatatgggagacaacctgagcaacgaatgtgtgatgcagctgatggtaacacagcacgaacgcttttccgaacaaaaaaacaaatgaggcatgaaaaagaattgcatatcgacactcataaaaggaggatggatttgcgggtgcatcatctgtatggcatcctgcggaccggtacaccgttttatgcggataaagaatgtaccccgtgaatatatgcgaaactattccatagaaggggtaaaggctccccgcagccagacactgcccaagcataccccgtggattgtctttgccaatgaagcaggaacatcctatctgagtccgagcggaaagaacgagatgcagtctgtgaaatacatggacgcatttctcgtcatcaagcgaaaaggagactggctcagagtcattcaatacgacccagccattctgaaaaacgggaaactgaaagaatggaaacaggcaaaatactgcggatggatcaaccaaaacgacctgttgctgacccggagcggctttaccgacattgttaccggattcaaaaacaaacaggtggtcatgctgaacgacagcgtggcattggccaccccaaaaacgtattttgccaacgactccgtaaaactgttcaaaaatacagacctgacacaagaggctggcaagattccattttacagtgtcgtatatccttatcaaatatcggaagacaaaggatgcaccctcgtggcagacaagccgcagcttgacgcagacagcatagggcatgctgtcatcggatggatagacgaacgcctgctgaccgcccccgaacagcagctccatatagacataacctcgctgccggacagcacgcttgtttttaaagacagggaacggaaagacaccttgccgctatcatccaacgacctgaagcggaaactgcaactttcggccagccagcctgctatccgctacagcccggtactgtcctaccggaacaatgacacgagcttctgcttcaaaacccggcttccgatgccggtcatcgacaaacgggaaagctatgtgctgaatgtcaacggcaatccaatctattacgggactttcaaaaacaagatagagaaggacctgcaaaaaataaacctcatgtttgtcctggaaggaaaagagaacaccatccaacggtttccagccgtggtgaatgccatccaaggactgcaatcgcaactggtgaatgacgacagcttttctttcaggttcggtgccgtgcttaccttcaacgaaccggacagccggaaagaccccatctgcaaactgactcccgactacatggagctgcttgatttcctttccgccaaagcacgtaatgccgagcaactgaaacctacatacggacgattcggcagctggtccggccttcggatcggagtggagcaattcaacaaatgtccagatgaaaccaatatcctggttgtcatcggcgataaagggttcaacagcgagtgggcagactccaccttggtgaacaagctggtaaaaaacaactgccgcatgatcggcttccagctctacggaggagaaccggataacttcaacaacttcgtgctgcaaatcgggaacatgatagattgctcggcaccacgcatcagccggaaaaaacgggaactgattgtatatcccgaacaaatcagaaatgaaaacgaatatgcggaggtgaaccataacacctattgtctggactttccaaatcggagcatgacacagggatggctggtgtttccgcaaaagaacgaatcgctggaactggaaggactgaccaccgccgtggattccatgctgatacaagtgaagtttgacaataccctgctgagcaacagtctggcaagggcattcgacgaagtgggtacacaccgatataggacagattcgacaatgacagcttattaccatatccgccagtcgggggtacaccccatgctatccgtacttccggataccgaacctgcctggagcctgcctgcacagccaatcgtactgccggactcgctgtcctccacactggactattatctgcttgtcaacgaagaggagttcaaacggttgagaaagtatgtggaagcaccctccaagctgatcgttgactataaatacgaagcggtcaaaaagaaaaagcaagcgaaggtggatatctgcgactgtccggacgactacctacaggcagatgccgaagaatctaccgtacgtgtaaagacggacagcctgaacgcaccggaatatgcctcaacccgccgtgcaaggagaaaactggtcagacatttcctttcagagcgcaacagggacagatattgcaaggtagggagaaagactttcctgagaatgcccctatcagaggtcttgcaaaggtttacctcctgcccgaccgactatcctttctttgaagtttaccgtgtcaaggacttgcggaaaaagaaaatgattacggatgcggagctggacatgctgattgaatatttcaaggaaaagaaaaaactgctggacgaagccgccggcaagccgttccagtccaacgggcagacatactattggatcagccgtgacctattaccatagtcattcacctgaaactgtattatcatgatttatgaaactattctgaaaataagaggaatggaggtgccgatactctattataactatcggtgccacatccggcactatgatgacccgaatctgagaaaaatcatacaactccacatccaagtatgcgaggaaatcggcaatcgggagtgtctgccggtcgagggagacctgattacgcttgcgtttgagtgcaagggtgaagaacagttcttctatgactggctgaacgaaggagccatgcacaacggggaaatccatttcatctacaacgaagtggagattgcggacattttccggttctgggactgcttctgtgtgaaaatagaagagtatatgagtgtaggaaactctccgatgatgatggtgctgtatttgtcaccggggattatcaaaaggaataatctggaggttagggagaaggtgtggaaggtgtcggatgtttcaattatatatcaaacttctaccgagaggaaagatgattcggttagcaatgattcaaataagaaaagtctttctgtaatttttgtaaaacctccatttcaattaaagaagaaatttcaaaaagatccattttatgaaattgaaatgaggaagcaattgcaaatgcagcaggatggaataaataatatgactatatttgagtggctgaaaaatagggagaattttaaaaaatatgggcgtaatcctaaatctaagaaaattcaagaagattttagggatagatataggaatgctaaaattgatgagtatcttttattgtatgaagatatggatattaaggctatagaggcaatggttgactcagaattggaaggcttagcagcattacataatcctgatcagatagcaggaggatatgttgatgtggtgactcaaatgggaaataaaagaataaattcgtccattgggtcacaatggggaagtatagaaaaaggtcgttctcttaatattgaaaatgaattgttaaaattaataacagaccctcctcctataacagaagaggagcagaaaaaaataaagatgaatgtaaatttagttgaaaacttagaaattgttaagtagtatgtttgagaaatttttagaaagaagtggaaattctataaaattggaagagtttagtgaggattatatccgacaatacaataatttggtttcggaaaaactaatttctttttggagaatagctggtattggcatttattgtaatggcttgtttagaactattataccgaatgactatcagtatattatagaggaatgttatcctatgtatgattatgaaacagtgactccatttatgataactgtttttggagatatttttgcttatgttaagaatcatgtaattggagattacgtcgtttttattaatataaggtatggaacttttaaaattctatcagaaaatattgacatattgttaaatatagtaattttcaataagagttgtcttgaaaattggtttttattgaatgaatataatacaataaaggaagtgaaggcgatgcctaagatagatgaatgttatggctatgttcctgctttagttgcaggtggaaaggattgtattgataatattcaaatagtaaagattgctccttatattgatacggttattcaattaatgggcgatttaaaaagaattagataatatcaaatcaacacatatgttacagaatgtttttaaggttgatacaatagtttatgtttcaattaatttaaattatgattatagtatatcttatatggaaaatatagcccggaacttcacgaagaagtatccaagctatcttatccataagaaaagcgaagacaagataaaagcctttctgaccgacagggtgaagaccaaagtggaaacctttgtgaatgcagaggcaaagaacgtggcagtaaccgaggtgcgagaaatagcagacctgatagcggaatatgaaggtgcagaaagttcttcatcttttggaccccatcctacggattccccctctttaggaaacaccggagtggagcttgccatgagtgtagacacaggcgcatcggacatccgtcctgtcaatgtagccaaacccacgggggcaacaggaaaacccaagataatgaaaagaagtgtcatccgtgtaaccatggaactggaagtgcagatggaaaccaaacaatacttgcaattcctgcaacagattccagacctgttcagcctgcatgaattccccaatttgagatgccgcgtgatatgcaaccagaaaaaggcaacaatcaacgaagagccagcaccggttgaagtgaaggttttggatgacagaaaataccagcggtggtttgttgcctttacactgttgatggtatgctgcatgggcggaatcatagccctgttcttttccattccgaacctgtacaaacaggacatccacttcctgcggaacgatacgattcatcaggagttttccatttccaacagccgtattgacttgaaggatgtaagcctgacgaatcatggcgggaaagacacacttgtcatcaaggataaaaagataatcatagccaaataaaaagcaatggaaaattcgattcagatacaagggataagaaacatgctatcccatagcggatgcccggaagacctgctggaaagttacctgcaattcctacaaaccgaaggccaacaggtgcagattgtcagaggagaagtctttatgatgtttgaaaaggaagcgcaataccgcaagagaaggaatgaaaagatgaaaggaaccgtaactttctgcaaaaacacgaagaacgatacaggggaatacaatacaggagtgttcatcggaatggaatttatccaatgctgcttcaaccatgggattcctgcacgggtgctgaatgtgcggagagtacatggggaagtgacggagattgtcgtggagttcgggaagtagatgaaaggaatacccctattgcagagctccgacctaataatatgtgggggaaattgatgggaaaatccccccacacacttcatcttgatatttaatgagaggaaggattactccttcttggatgttttttcattatccagccccaatcgcttgcataactccggatcgtttttgatacggcccatctcttcgttgatgatggcctgcgcgtccgacttgatctggtcgtagttacgctgaatctgctgcatcatgatgtcattaccgtccttgtccttgaattcgttgatgaaagggattttcctgtaggccttttcttccgcactgaccgccgcatggtctacaacaatttcggcatggaatattttctgttctatcttctcgccaaaattatccgccacagccccgacaaacgtaccttgcgacagattggcaatcttggatgccgggataagcgagtcaagctgcgtgttgatggaagtggaaacatcctgacggttgatggaaacggactgacgctgctggagcaccttgccgaagcgttcagaaagtgtctttgcggtttctccgaccacctgcccgctgaatatatttcctaccgtgttctgaataaccttggactccttttcaccataatcgcgggtcagctggctgaaatcctgaaaacccaaaagtacgcccaccttgttgcttcgtgccgttgcaatcagattgtcaagcccccggaaataaatggtgggaagctcatcgatgattacggcacatttgagctgtcttttcttgttgataagtttgacaatacgggaattatatagtccgagtgcagccgaatagatgttctgcctgtccggattgttgccgacacaaagtaatttgggttctttcggattgttgatatccaacgaaaaatcatttcctgtcatcacccagtatagttgtggggaaatcatacgcgtaagggggatttttgccgaagcaatctggccctggagctgatcctgcgcccctcctttccatgcatccatgaaaggagaaaggtagttttccaactccggataggaagtcaggacggtgaacaggtccgaataaggcttgttcagtaattccaccgcatgcgggaacgtacaataaatcccgttcttgtaaatcttcaaataccagattattgcagcaagcagaatgatgggggattctacaaaaaagtcaccctgcttttcaatccaggtgcgattgaggttgagcattatcgtatagctcgcctcgtacgcatcggaaatgtccgtcataaattccggattgataggattgcatcggtgagacctgcgcggatcgtcgaaatttatgacatagaaccggggcttgacctcgtacttgtccatattcttcaacaaagaattataggctatggtggacaggtcatcaaacttgtaatcgtagatgtaaatcgcaaagcccttggctataagctggcgtatgtaactgttgactatcgcataggacttgccgctacctggtgtcccgataaccatgcaggcacggaaaatattgacaatattgacaaatccgttattccagcgttttttataatagaatctcgttgggagatttaccgaatactcattctccatcagtcgggtttcctgcatgaaactctcattttccatattgaacacatcttccatgaggttgtgcctgtaaaggcggctcatccatagccccgacatcagcagggcgagatagcctgccgtaagagtaaaaatatagaatgcggtatttgccgcgtgcggcaatggcagctcaagcaaccaccagtttagaaagaacagtgcgcatcctgccaccagcgccgcataaattttaggccaggttatcttttcacctttgactccgtgcgtacccagacaggaaacggccagcagaagcactgccaacagtttgctccagagaatgcagttgaaaatcccggtcgtattattgaaattcaccagaatcctgtccatcaccgcaaggttcaagtgccacgtggtgatactcggataacaatacacatagacgtgtaccaccaaaagaaaaatactcacggccctgccaaattccatgatcttggcaagcgccctcaaatcgtcttcctgctgcataagaattgtatataaatgggttgatacttgttttgtctaaatgccacgtttgcgtccggtcttcttctttttcttcatgcggcgtgcaaaggcttcctcctcatagtcacgcgggttggtttccatcgaaagtatgcccgccgccagttcgagcgtgctgccggattcgtggcggtgatgctgccgaagttctgtagcggaatgtccgccccgttccttttcgggtatgttttccaaccatttgaaatagtcgttgaacacattggcggaaaactccttgcccatgcgtgaaccgttgaacacttcccgtcggtcgtggtcaatgaaggtgacaccgtagatacgtccccgctcattctcacggaacaccacatcgatatttttttgccccagcagttccacaaaccgtttccgtgaatccgcctgccgcaaggcacgggcgatgtccgcctgtatggagggtgcccattttccctctttgagagctttcagattcatcaacatccgcttttccaacagttcattcccgaagcgttttccgaaacgtgaactcttgaacggcggactgaccaccttgccggtatcatccgtggcagaatagacaatgccggtgtagggtatgccggtgtactcccccctgacctgtttcgcctcgatgttgagtgtggaaagcagtgcgctgtattccccgaaagtctggaaacggtagctttccagtacggctttaagggtgttgcctacctgatggcggacatcccccaaggaagcatccaccttttttagttccgctttcggattccgcctttccgtgtccgctccgttgcgcaagccgaaatccgtttccagttcccgacaggcggtcatggaacggcggtgctcgtaggcgtcactgatcttttttccctgtccgtctacacagacactgacgatatgaatgtgggcattatgggtatcggcatgtttgtaggctatgtacggctgattcccatagcccattttctgcatataccgttccgccaactctaccaattgcccatcagtcagctggtcttccggtgccggagaaagggagatatgcaggacgggcttctccgtattgcggtttgccagcaggtagttctcaaaagagagcaatgccagacgtatgtcctcactgggcaatcccaatctgtcggaaatcatgcggttgcccgaaagaatctcggcggtacctgccgttaccttgtcgtagttataggcaagtgctccgtaaaggcttgttccgtgacttatttttgcaaccatttccgctcgtattcctgggttagcaccatgacttttttacatacaagcatcagttcgatgctcagtttctccaacctgtagagcaatgccatcgcacgtttttccccgaaattgttcttcaaggtccggacaacctgattgtagttgtttccgacggcctgaaactgcctgtggaattcggtcagtttgatgtagtagtccattgtcgccttgtcgattttcacaactttaatctgtcccgaaaagatggatttcttgatgaacagcgtgcggtccccggctcccgaatccgccagcaatttttcaaatcttgtgttctcctcggcgttcaggcggaagctgtacttgcggtccgccggatcactcttgggctttctgcccgtccttgtccctgttgttttctccatgcacatgagatttttggtttgtacttttttctcttccggaatccgcgactttggagcggattcccccggcttttagccgggctagttgtttttgtcggacaaaagactttttgtcggacgaaaacacaacttgctctgttcgcttgaacagagaaccctccttcgtcggattgctgcgcgacgttcacggaacgctgtgatccgacgaagtcagttcttttccatcgtctgattccgattttgcaaaattagacagtgataaccgattggtaaacagcgtttgatatgacatttgatgacatctgatgacatctgatgtcaggtaggggaaatgttggtggaagtttcaaaaatagccgctacttttggcacagtgcatgagggcatacattgaaacattgtcctgtaaggggtattgcttgcctgccacaggtggtgcatggtgtgaatgcggcatcatccatatatgtgcaatgccatatatgctgcacgacaatcctgcatgacggaatacattgcatccgtgcaatgcagtatgggatacattgaaccccatattgcatgaatgcaatgcaccttatatggcaatgcccatcggcaaccggtattacactggtgcaatatggtatgcaatgtattcatgcaaaccggcaaacaatgcgtcattgccgtataccaacggatgcattgccgtgtgatgaaacgaaaaaatccggacagatatgaaacaaattatacactctaaattcaagcctatgaagaaagaacctttatttgtcgctttgagcaaccagaaaggcggtgtgggaaaatccacgttcacggtattgctcgccagttacttccattacctgaaggggtataacgtactggtggtggattgtgattatccacagcacagcatcagtaccatgcggaactgggaagtgggaaacattgagaagaacgtgcatctgcaaaaccagctggtggaacagttcggagcaagcggtaggaaagcctacagcatcctgaactccactccggaagaagcccgggaaacggccggacgctttcttgaaaaatcggagctggattatgatcttgtcctttttgaccttccgggtaccgtaaatgtgcccggtgtattccagtccgtaatcaatatggattatgtattcacccccatcacgcaggaaagaatggcaatgcggagcagcatgtcttttgtccttgccatccgggaatacatgcaccggcataaggatgtacccttgcgtggtatccatatgttttggaaccggatggacaaacgtgtttccaaagacctgtataacggctatactgaaattttccgttcgctgaaattgccggtactggaaaccgtcattcccagtgcagaacgttacaaaaaagactccggaatgaaagggcctctgttccgcagcactttgttccctccatcttcctccgcaatgaaaggaagcagtctggacctgctggcagcggaaatagaaaccatactgaaacttcaataaaaacaattatgactaccaaaagaagaacggattaccaagtggatgaggaggcattgaaacgcatgatggcaggagatgtgaccgctttggaaagaacggttcctccggaagaggagccggaaacaaaaagtcaggctggaccttgttcggagaaacaggagaagaaaagcggttcttccagacagcaaataaaaaaagcaccggatggagcggctgattcagatgaataccggagccggtttctgaaagtgaaactgtcgggagcaagaaggcagacctatattaacgatacattgtacagaactgttgccaaagtattgccggtcattgcaccggaaatgtctgtccccatgtttttaggaagtgtactgtcagaccatctggaaaggtatcagcatatcatcaatgaaatatataatcaagaagcaactcaaaagccaatagaatggaagaaatagtttatttatcaatacggttcggctgtaccgcttatctgttatataaggtatggaaacaaaaagagagaataggtaaaatctgtgatctgctttgtactcctcgcaatcggccacaagcagaaaaagacaacggtgaaccgggaaatgcacaggatgtgatgggagctacccgctttgtctatctggacgagaatgccgggaagaccgtcgccccttacatgagccagcaactggaaaccggaagtgattttatcggagcggataaggatattccggaagatgaagtggaatgcaaactgcctttggaggagatgagaatgctgaaagatgaacaggaggaactggacagccgctctcccgaaacggaagccattgctccgatggttactcctgctgacctgctcaatgtaggcgacgtgctgcttaacctgaatggcgccggctcggacgagaacaaatcatacagggcggccatgacactgcattccatccgggaaacggacatgtttgaactgttctcctcccaggtggagaacaagaagctgattgaggaactgatggggaagtatgtggataaggaagggaatgcgttgcctttgaaaagagagaggaaagaaagcaaacatgttactgactggaggaatctagtctgaaaaggcaatatttatcatgttcggaaaatcctgtatgcgttaaagtatatgggattttttatatgatgtacccatttaacgaaaacatgcaacaggcattcttccaaagtggaggaaacctgttttttctttttcatccgttgtacggcaaagacatctgatgacatttgatgacatctgatgacacctctgaatcatagcgtattatccccatttatctttgttgtcgaattcaaatttatgtcttacccaaacgattcgacaatgaaaagaagaatccttttttctgtgatgtgtgcggtcatcgccgcaaacacctttgcgcagggccagggccttgcgggtatcaacgaggcaaccagcctcatgacctcgtatttcgatcccgccaccaaactatgctatgccatcggtgcggtgcttggtctggtaggcggtatcaagacctatggcaaattttccagcggagatcctgacacttcgaaaaccgccgccagctggttctttgcctgtatctttctgatcgtagccgccaccatcttacgttccttcttcctctaaagcctatggaatatccggtaaacaaaggtgccggcaaccccgtcgagttcaaaggactcaagtcgcaatacctgttcgtctttgccggagggcttgcgatggtgctccttatggtagtctttctttacctgacgggggtggaccaatggatatgcttatccttcggaatcctgtccggcagcctgttggtgtgggtgatattccgtttgaatgcccgttacggtgaacacgggctgatgaagctgctggctgaaaaacgacatccacgctatctgattcaccgcaagagagttttcagattattcacaagaagaaaaaaacaacaatcatgagaaatgtattaaaggcggaaacgctggaacgcagattccccctgctatcggtagaaaacggctgtatcgtgagcaaggatgcagacctgaccgtggctttcgaagtggaactgcccgaactgtacacggtaacggcagacgagtatgaggccatgcactcctcctggatcaaagccatgaaggtattgccggaacatagtgtcgtctgcaaacaggactggttcgtcaaggaaacctaccgtccgaagaccgatgacggagaacagagcttcttgacacgcagctatgagctgcatttcaatgaaagaccttacctgaatcacaaatgctacctgttcctgacgaagacaacccgcgaacgcagccgtcggaagagtgacttcaataccctttgccggggattcctgttgcccaaagagataaccgacaaggatgctgccgcccgctttcttgaggcggtggaacagttcgagcgtattatgaatgattccggacatataaggcttcgccgtctggaaacagacgaaatcaccggtacgaaggaacgtcccggactggtggaaaaatacttttccctctcgctgaaggatgagaccgccgtattgcaggacatctgcctcaagcccggcaggatgcgcatcggtgacaaacgcctctgcctgcataccctttccgatacggaagacctgcccggcagactttccacggacatgcgctacgagaggatgtccacggaccgcagcgactgccgcctctcctttgccgcacccgtaggactgctgctgtcatgcaaccacatatattcgcaatacgtgttcatcgacgacgcacaggaaatcctgcagatgatggagaaaaactcgcgcaatatgctctcgttgtcaaaatacagccggagcaatgccattaaccaggagtggacggagatgtatcttgatgaggcacataccaaaggagtgcttcccgtcagatgccactgcaacgtcatcgcctgggcggaggatgcggaagagttccgccgcatcaggaacgacacgggcagccagctggccatgatggaatgcacgccaaggtataacaccattgacacaccggtcatctattgggcgggaatccccggaaatgcaggcgactttccatctgaagaatccttttataccttcctggaacaggccgtatgcctctttgccggagagaccaattacaggagctcgcccagtccgttcggcatccggctggcagaccgccagaacgggataccggtgcatgtggatatttccgacctgcccatgaagcgaggaatcatcaccaacagaaataagttcattcttgggccttcgggcagcggaaaatcctttttcaccaaccaccttgtccgccaatactacgaacagggagcgcatatcctgctggtggacactggaaacagctaccaggggctgtgcaggatgatccatgaccgtaccaacgggaaggacgggatttacatcacgtatgaagaggacaatccgatatccttcaacccgttctacaccgaatccggaaaattcgatgtggagaagcgtgacagtatcaacacgctgatactgaccttgtggaaacgggaggacgagtcgccgaaacgttcggaggaggtcgctctttccggagcagtgaacgcctatatccgaaagatttcggagaaccggaacatcagaccggacttcaacggtttctatgagtttgtcgccgatgactacagaagaatgattgaagagaaaaaggtgcgtgagaaggattttgacattgacggttttttgaacgttctggaaccgttctaccggggcggagattatgacttcctgctgaactccgacaaggaactggacctgacaggcaaacggttcatcgtattcgaactggacaatatcagcagcaacaaagtgcttcttccagtggtgacactgatcattatggaaactttcatcgccaagatgcgcaggctcaaaggtatccgtaagatgatattgatagaggaatgctggaaagccctgatgtccgccaatatgagtgaatacatcaagtacctttttaagaccgtcagaaaatatttcggcgaggctgtggtggtgacacaggaggtggacgacatcatcagctccccgattgtgaaagaggccatcatcaacaactctgactgcaagatcctgcttgaccagcggaaatacatgaacaagttcgagcacatccagcggctgctcggtctgaccgagaaagagaaagggcagattctttccatcaaccaggcgaaccatcccgggcgcttctaccgggaagtatggatagggcttggaggaacctgctcggcagtatatgccacggaagtgagcgaggaagaatacttcacgttcacgaccgaggagtcggagaaactggaagtacaacggattgccggaggaccggagggcagtctggaaggagccatccgccgtctggcggagaaaaagcgagaggaacagaaacaggtatcaaacccgaaatgaaaacgattatgagaaacagaccccttatgaggctggcggtatgtctgataagcatggccgccatgatattacagagctgttcggaaagcggtatcgaccgcgacaagatctgcggaacgtggaccagcgtggaaggcagacctgacgtgctggtatacaaggaaggagaatgctataaggtgacggtgttttcccgtagcgggagaacccgaaggctgaagccgcagacttacctgctggtggaagaaaacggaaacctgtttgtcaatacgggctaccgtgtcgatgtgtcctacaatgaggcagtcgacgtgctgacattctcaccgggcggagactatgtaaggaaggaggaacgggcatgaaggcaagaacgcttctgatcggaacggcatttgtactgggcgttaccggagcacgcgcccaatgggtggtgacagatcccggcaatctggcccaaagcatcataaacatgtcggacaatatcgcccatacctcaaagacggcagtcaatacggcagaaagctttgccgagacagtaaagatctatgagcaggccaagaaatattacgaccagctgaaatcggtcaacaacctgatacaggatgcccgcaaggtgcgtgacatcatcctgatggtgggcgacgtgtccgacatctatgtaaccaacttcggcaagatgatgaacgatgaaaacttctcaccgcgcgaactggacgccatcgccttcggttacacccgcctgctggaagagagcaacggcgtgttgcaggatctgaaacaggttatcaatgtcagtaccctgtccatgaccgacaaggaccgtatggacgtggtggacaactgctattacgagatgcgccgttaccgcaaccttgtgagctattatacgaacaagaacatagccgtaagctacctcagggccagaaagaagaacgacctggaacgtgtgatgcggctctatgggaatgaaacctccaaatactggtagccatgatgccgttgtcgatagattttgccaacctgcacaccatactggcaaccctgtatgacgagatgcttcccctttgcgaggacatgatggacgtgggcaagggacttgccggactgggtgcgttgttctacgttgccgtccgtgtatggcagtcgatggcacgtgccgaaccgatagatgtttatcccctgctgcgtccctttgccataggcatctgcatcctgctctttcccacgctggtgctcggcacgctgaacaatattctcagtcccatcgtgcagggcacacacaagatgctcgaaggacagacgatggatatggaacagtaccggatccaaaaggaggaactggaaaaggaggccatgctccgcaatcccgaaacagcatatctggtaagtgacgaggagtttgaccgtcagctggatgaactgggctggtcaaccatagataccgcctcccggctgggcatgtatgtggaagtcgggatgtataatctggaaaagaaaatccgggatgcattccgcagcctgctggagctgatattcgcagcggcatcgctgctgatagacaccgtgaggacttttttcctggtcgtactctcgatactgggaccggtagcgttcgccttcagtgtatgggacggattccagtccacgctcggacagtggttcacgagatatatttccgtttacctgtggcttccggtcagcgacctgttcagcaccctgcttgccaagcttcaggtactgatgcttcagaatgacattcaggaactgcagaacaatccggactactcgatagacaactcgaacagtgtctacatcatctttatgctgatcgggattatcggatacttcaccgtgcctacggtagcaggctggatagtgcaggcaggcggtgccggaaacttcagccgtaacctgaaccgtacagccaccaagacaggggggcttgcagccggagcaggcggtgccgtattggggaatatcggaggcaggctgaggggcaaataaaccctgcggagcctccttcccatgagtcgggcaacccaagatgacgggtccggtgacttgtcggaacgggatgtcccgtcataccggaaatatttattcattcaaaccagacatcaaaaaaatggaattcaagtcattgacaaacattgagagcagcttcaagcgcatccgcctgctgctggcggtctttgcctgctgctgtgcgctcgttaccggatatgcgctgtggagctcataccgctttgccgagaagcaacgcgagaaaatctatgtgcttgacgggggcaaatcgctgatgatggccctttcgcaggacctctcacagaacaggcctgccgaggcgcgggaacatgtaaggcgctttcacgaactgtttttctcgctctcaccccagaaggatgccatcgagcacaatatcaaccgtgccctgcaactggcagacaagagtgcctatcactactatgtggattttgccgaaagagggtattacaaccgcctgatttcaggcaacatcaaccaggtggtgcatgtggacagcgtggtgtgcgactttgccgcctacccttacaaggtgcggacatacgcccggcagctgattatccgtgaaagcaacgtgaccgagcgcagcctcgtaacttcctgctcgcttcaaaacacaggacgttcggatgacaatcccaacggattcattatcgagcagtttaccgtgctggagaataaggacataagaagtgcggaacgatgaggggaaaacgcggattcttcggccatgcggacagccgggtacggctgttctgccggcggctgacaggaaagcagcgcatccttctggcaggcacggtctcgttcctgcttgctgcctcctgtctgtactcgattctctcctgtgtatcccgtttcggggagccgggccaaagaccggcaatgggacatatccgttccgtcgtgttccggtcggaaagaacaagaaacattcattcaaacatccataaacatgaaaatggactttcagaaaatcagggaacggctcggagtgtcaaatgacaagccgctgactcccgaagagaagcgccggcgcgcaaagtatattgtctatccgtttctctgcctgctgtgcatggggttcctcctgctggtattcagtccgtcggaaaaggagaaggcggaaatggaaaaaggcaagggtttcaacgtggagatgccttcaccggaagattcggaaatggagggcaacaaggtaagcgcctatgagcaggaagcactggcaaaaaaggaaaaatggcgcaggggaaccttccaggagatgtccgaactgctcaacaagggcggtcaggatactgccggtcttactgcaggaaaagcaaacatggaacttccgccggaaccggaaaaggggaaagcccccggctccatccgttcctctgcagaagcctaccggaatatgaaccgttcgctgggcactgtatatacccggaatgaaaatcagccagatgccgatctgctccgccgtattgaggatctggaaaaagaaaggaagccggcggaagaacaggcggaaggccagaccctggaagaaaagatggctctgctggaaaagtcctacgagctggctgcccgctacaacgggaaagagcctgatgcttcctctacggccaatgccccaaacagccggaaagaacggacggctgtccggcctgtaaaacgggtacagaaccggatggtgtcatcactcgcccagcctgcaggcaatgaagacattgcttccggatatgcaggcgagagaaataccggcttccacaccccggtaggcaaaatgccatcttccggcaggaacaccatcgccgcctgtgtgcatggcacgcagaccgtatctgacggacaggcactgcgtatccgcctgcttgagccgatggcagtggacgatctccttatccccaaaggtacggtactggtcggcggtacacgtgtcgagggggaacggatgggaatcctgatcgagacagtggagtacaggggcacgctgtttccggtggaactcgaagtgtatgacgctgacgggcagcagggaatccttgtaccgaactcgatggagtatgatgccgcacgtgagattgccgccggcatgggcacctctataggaagcagcatcaatatctcaacggatgccggagcgcagattgcctcggatgtgggcaagggggtgatacagggtatgtcacaatatgtgggcaagaagatgcgcacggtgaaaatcaccctgaaggccggacaccggctgttgctgcattctcctgaaaaatgaaggaggaaaggaaatcaaccatttattcaccaatcaaccaagaaacacacatgaagaagattctgatgatgcttgccctgattgcgggcacagtggctgcatacgcgcagcagagcagcggggattattatgaaggactgagccgcaagatcggattcagccggatgattcccccacacggtctggaaatcacatatgacaagaccgtacatattatttttccctctcccgtgagatatgtggacctgggttcgcccaatctgatagcgggcaaggcggacggtgcggaaaatgtgatccgtgtgaaggcaacccggaaacatttccggagtgagacaaacatgagcgtaattaccgaagacggcaacttctatacattcaacgtcaagtatgccgacgagcctttgctgctgaatgtggaaatgtgcgacttcatccatgacggagaggccgtgaaccgtccgaacaatgcgatggaaatctacttgcaggaactcgccggggagtctccccgtctggtacggctgatcatgaaatccgtgtatgaacagaacaaacgcaaggtcaagcacatcggctgcaaacggttcggagtgcaatatctgcttaaaggactttatgcgcacggcgaactgatctatttccataccgaagtgaagaacgccacgaacgtgcctttcgacgtggacttcgtgaccttcaagatcgtggacaagaaaatcatgaaacgtaccgccatgcaggaacaggtcatctatccgcttcgtgccttcaactatgtgacccgtgtggacgggaagaagaacgagcggacggtgtttgccctgcccaagttcaccattcccgacgacaagaagctgatagtggaaatgtatgagaagcaaggcggccggcatcagtcctttgatgtagagaatgaggacctggtacgcgcagaaaccgtcaatgaactgaaagtcagatgaacgccatgaaaagaaactccctctttattaccctcctgcttgccctctttacggggcaggcagaagcccaacgccgcctgccgggaatgaaagccgtccgcttcaccactgaaatggccgacggattttacagccgggcaaaccgtcacgatgcaggctatgccttctcgctggctgtatccacctgtaccgggaacagaaaccagtggatgtttggcggtgagatgctgaaacgtaacatcccttaccggagtacgcatatacccttgtcgcaatatacgggggaaggcggttattaccatacgttcttttccacccccggcaagtccttcttcctgaacctcggcgcttccgccctgttgggctatgagaccgtgaacgaaggagaccggctgctggatgacggagccgttttgcagcaatgcgagtctttcatctatggcggcgcggtaacgctggaagcggaaggatacctgtccgacagggttgtcctgctggtgcgtctgcgtgagcgtttcgtgtggggcagcgcctcgggaatctgccacttccagtatggaatcggagtaaaatacattttctaaccttaaaagaatacatacccatgaaaagaaaaatccttgattttatgctgacagcctgctgtatggcattctcctttcttggtcttgtcgcttgtgacaatgagctggatatcaaacaggaatacccgtttgcggtagaagccatgccggtagcggatgagattaccgatggggagactgtggaaatccggctggaaatcaagccggaagggaactttaccggaaccgtctatacgctaaggtatttccagccggatggtaagggcagtctgaagatggaggacggaacggtactgaagcccaatgaccgttatctgctgaacgaatggaaattccgtctttactatacttcgcaaagcggcaaggaatcccagaccatagacctctatcttgaagataattgggggaatctgcaacaattgacatatgattttaatggaaaggatacggatgaagaaaataacaaggaggctgcatgaaaagaataccggctgttatgatctttctgttacttgtcttgtacggcaaggcggaaaatcccccgtctgacaaagataaggcggtagcctgcatcaagcggtgggaaggctggcaccgggggaaaatgccttacatcggttacggacaccgcctgcttccccacgagacgctgaccgagaacctgagtgaggcacaggcggactcacttttgagatgcgaccttgaacggtgtttgaaggtattccgaaaatatgggaaagattcgctccttttaagtctgttaggctttaatgtaggctgttaccgtctgatcggcaacggcaagatacctaaaagcaaactgattcagaaactggacagcggcaaccgggatatttacaaggaatatgtatcgttccgctgttatcgggggaaagtcattccaagcatagagagaagaagaaaagaggagtttgaactgttctatataccgtagattgcttgttgataaaggtttggttgttacgagacgaccgaatcttttttatttgtccggtatgaacatatccctaacaggtgttgtattttaatgtaaccgaaagacataaaatgtgttattgagcatatggtgcataaaaaatgctctttgaacattgtctttcttgattttttgctaagtttgagatgtaatgtcaaatgcataaaacaagtcgtcatgaattcagaaataatattggaaataaatggctacaaatgcaatctactaaagtataaatactgtttttcccgtaatatagaccgtaaaggaagacctgtaacaggaatgttaggaggaaacatatatatagaaatggaatctaatggcagcaattgtattttggatatgatgcttgttgatacggatcggcagcgttccgctttcttttctcatgcagaaccttttccggtttgggggaagatactgcatagcatagacgatatgatgtttcgtgaacttttacttcgtatcgttatatcattgaaaagtttacggatacaaaaaacgcctaagctatcacctaattgtggcaatttgcgatgaaacctttctgaaagtaagtgtaaccgcaaagaatgcttttcttcgtctttatactcgaattgcttttcaaacataatctgattgttctgttctcctttgacaatgatagtggcttccttaccattgtgggcttgtacttcaattgaaattattgttctgttcatacttacaaattttctttattctatatataaaactttgggaaagatatatgagtgacattttgtcagaatagagatataggcatacctcttgtacatataaaagtgtcccctaatattcgtagtatcaggaggaaaaggattcgtttaacactgtaaaattgaacaaaatatggtataaatattggattgaatttaccccatagggaataagacaaaagcttatttggttagagaagtgattggtaataaacttgctcttaccgcacccgattatactcgtttatacttgggtatgtctgaagttgaaaagataacggactgtaatgtgttatttaaactgggaaaaatagatttttaaatattggaatatgaaagaagaaagatttattgaagaagattttgaaggttttctggaggacttgataaagtctggtcgtttagatgacaaagaagctggtatagctaaaaggatgttggacaaaggatatgacaatttatctgataaacaaaagtatgtctttaataagatgattaggaataacagcgttgaggaatgtcaaagatgtgcttgtgatattccttggtctgaaatgcttgaagctcttgataatggcggttattgtaactactgtcagcatatgatggagaaactggaaaacgagtaagaaaataacgggaatagctatcaaggttattcccgttaatgtttaatcagttattataaatcagacaagcctatttagggtattgtcgtaaatactcacctcatataaataataaataaggacatttttcccaaccatattatgattatatgaacgaaaaccataaagacacattacatattgaaagtattcagcaactaaaaaaacaagaatcctgatttagttgatgcttttctggaaggagatagtcttttatttagagtgcactataatcaaaatttaattccatatacttaccctgttcaagttaaataacgagcaaatagctgcttggataaaatgacttgaatagtcaaattagatacatttacaaagcgggcagagtcataaaatgggaaagggctaaaaacagaaacgccacaggtatgatgtgatatacatcaccttgtgacgtttctgtttttttaagatgtatttgtctgctattcttacttttgaagcaagtattcccctattgaaagataccggtctttgattgtggcattttcattgaatccattcagacaatggagcaaggctttctccaaagtggtgtatctgcggttaaaacattgcggattgtccaggcaataggcattcaaggcatatctgtatggggcatattcaggattatcctcttttgtgattttcacatgccaaggaaagtgtatccgcagagtgaatgaccgtgtttccccttttgtaatccgttcctcttcctccagcatttttttcacgagggacctgtccagcaacggatatccatattccctgtaatgtttgatatggcagcaatactccgttgcgtattgcttcaattcttccggtcttataccatagtgcttcccatagaaaagcagcacttccctgcctgttacgataacgggctttccgtccgcttcatgtttaaatacctgccgttccatcttttccctgtctgtcagcaaggcaaaaccgaaacattccgtaagggtgaaactttccctgccgggaacggacagcccaataaggctttccaatgtgtggcagtaaaagaaaataccgtcatcggccataccggtgtccggtgaaagcataattcttacatccttgacctgaccgctgtccctttggacaatccggcaatttgcgtaatgtggctcacaagcattctctttcttgaacctgtggtatttctccaaaatttcgttccggatttcctccttgtcggtcagggcaactcccaatccgcagttttcgcaccacccgtaataaaaagcttcgtccgtgaagtggtcgaactcttttgtgttggggtttaccattgcctcacacctgacattggccgatccgcatctgctgcacactatattattttccattgttcttctgctttacgggcgactcacggccgcccttgtcatacaattcggttgttattctcttaatttatctttacccggttcatcagctgtcccgaaatttcatgcagttcccggcagcgttctggctgctgttcccttgcaaaggcggtgattccctgtgtcagtttccatagcgtggccccgcctgtaactccgtcgtcaggattgttgttcatcagcagtttctcgacctcacgtccctcgtttttcaacaaggctcctttctgcaccagattcttcagttccttgtcgaaatccacgtctatctccgatgctccttgaatttcgatggccttctgcatgatggtgtctttgctgtacagtcctttggtcaggtcggaaacagccgatacggtggtctgcgtgtccagttcgtaggtcttttgggagagggacagggattccggcagtcggcctccaaggtgtatctgccgcatgacggactccctgaccatcccgttcaggcacgccccgttgagcaggaacgaccgcatatcgaccgatccgttgccatagtcggatgtggagaagcgtgctcctgcgaagatgatgaccgttccgttcttacgggtgggtatctctatcggagtgggcaggattgtttcacaccatactttcgtgtcgttcatataggcatcggacacgaccgctccctgtcctcccgcctcacggatgaaagcggtcagtatatccaccgagttcagccgacggtaggagtccgacaatacgccccggacttccattcctaccgcccgtatcagtacccgtgtacgctcggtccatcccgaatgctcgttcaggatggtggcgcacaactgtttctgccaaacatccccggcggaaagctcgcgcaggtatttggcgggaatgcccatcttctccgaaatctggcttatggcgttgccgtgcaggttgaagttcccttcgggcattgccatctgtacccttccttccgctttgaaagagataacggggcgttccttgctacgttggcttaccccgatgggagcgatgaaatcctgcgcgatccgtccctcactgagcagacggttaatggtgtccatgacaccaccttgcctgccttctatcatccgctgtaccttgttaatgactacctggttgaggccctgctgcttctgtaccgatgcagctgccggcattactgttgtttccataatactatgtttttaatgttgatgaatcagaatttattcttagagcttgtcttggttgttttagcatgtcccatgtatttttcttctgacaaacggatataatcctcttcgctatatccggtcagcccgaacagttcataatatccggggaaagtttttttccccgcttccggtatatgcatgctggttcccttgtggcagcagatgatatgccggacaaagcggtaacacttgcaaagatcagccacgacggtatattcgttgtccgtatgaggttcgtaatatccacaggaaagattgatacaggatacttccagaccgttccttttcaaagccgccacatctgtattcagtccctgtgccggcttgtagccgtacttccggacatctatagctgaaatgaactcgttggagcagagcttcatcccattgatttgtgttaccatatccccgttccctttccggtcacactgaatcacgaaacggcaatcggaaaagaaggacatatcggcatggctgctgcctatgcatcccacctcctcctgtacgaagaaggcacatttcaccgtcttgcaatcctccaggcatttcaggcagatccagatgccgttcttgtcatccgcaccgattccggtcatccgtttacgcttgtgatcatagccgacaatcatcgagtccgccacaagatgggctgcataagagcctgtcttgcgccggtgtacctcatccatgtgcgccacgacacaggggtagctttcccggttgcctttgaccgcatagatgtttccgtacctgtcttgccggaaaggaatctccatccttttgagttcctctatgatgaatttagccatcttcccctctctgccagagggggaagaaatgccgtaaagagccattagtttttccatgataatgatattttaggaaatgaacaatttttcgatttgcaggtatcgtctgaattccggtacgggacgccctttacgaaagagaaaagacggatatttctttcctttatattccactgataatcctttcaggactttcccgaatacggtagatacatagtacatatcctgacagttcttgcagaatgccgcatccgggaagatatgtatcttcccgcatttgggacatacatattttttcctgtttgcacacccttccgtgctccggcaggtggctatgctcgtgtcgccctccgtatttctcagttccaggttaccgtccgtcagatgaaggctgtagaacgtgtcgaggtaaggcacccctttcttgtgccacctgcaggcgggcactttcaccgtcaaagagacctgtatattatctccggccgcccattcctgcccctcaatgggattcagtacggtgaaatccgtcgtatgtgtataatcgttgtatctgcgtcgcaacaggatgcctgcctcctgcgcctgcttgcggatcagttcgacgacgaatgcgtgtgaggaatagatacgatccagcagggaggcggcaatcggtgtgtttattgatttccacaatgttatctcgttccatacaatggcccgtccgaccacattgctgctgtcatcccttgccacgagtattttggctcctgcgaaattggcatagaaatccgctgcattacgggccttgtcttcatatctcatacaggagttgtgcaggctggattcgctaccgtcagatatgggactatagttgctttccagataagcctccataaaatcgttcatactgtcatgcagtctgattgtgaccttgctgtccagtgagatggcgctgcagaaatagttgatttcatcgggctggtacggtcccagatttttgaacagctcgataaacgtggacggttccagatctgtccggttctccggaaaccagggtgcctgcggattgttccggtccgggaaattgggatggcccaagtctttgttgcatgccgtgaacacgatccggattttcttgaacgtgccggcttccgtccgtttgcgtttggtggagaaaaaattgtaggacccccgtatgacttcttccaccggtacattcttttttacttccgaaaggatatctttggctatcacacttccgttttccgccgcatgggtcaggcgggatttcaattcgttgctaacattcagtttcataatcattcggtttattgtttataaattctgttgtttatatggcaattgtttcttgccaggctgcatttggcgcaatttctctttccgctttctgagcaggtcaacggacatgttcctgcttgtccgatattcctcctcactcatccggcgaatggagggaatgcccgtccgggtcagcgtatggtttaccatccagccgtccatgaagttttcggggcagaggctgtcatggtggatgacctcacctatgcagccatgtacgagcatgttgcaaacggtcatcaggcaacaggtacggctgacatcctctgcaaccagataattacccaggtggcgtacatgatatgccagcagcagccttccgcttccgcatgtcgggtcacagatacgttttcctgtcgctgtctcccccgaatcggtacataagaccatcaggtcgcagatatccggcggagtgaagaactgtccgttcacctgccgaccgcttttggaggatattgccatgaagaggtcaccgaacgcatcaaaccatccgccggattgcaattcccgctgcatgagccgtatccatccggtaagcatttccataaaatgcctgttctgctgccgtttgtatttccagtccataaggggcggtgcgccgggagagaacccgtgaatgacatagcgcaggaaatcgttgaaaacggatatcggatcgtagccgttcgaataggcgaaatcacagaccattttctcaagcggacgtatcgcctgcggtgtgttgtatggtaccatattactctgattttttatagattgttactatatgtcttttatggtcagtctgtatcctgacgggagaaatgccaaggaaagagagatgggtgtccgctttcagcatgttccattcccatgcgggaagttccttccattccatacggtatgcccagagtatgaacagaccgggacggaatccgttgaaaagctttccgtgcagaatcccgaccagccgttccagttcttcccgcgagtaaagggtgaatgcctcattccgatagacaaaggcatcagccggttcaatatccggctgacactcgatgaggtatctcttccattcttttgtggtgtactttccgtacagaggatcgggttccgtgtatttccatgccctgacgaatgtgtggaagaggacggcaccgttcctgtgccttccggtatgcccccacatccggaactgtttgctgcgtatgccatcgggaatcagcaattccggaccggttgtaacccaagggcctccttcggtattgtaaccggtacacttttcattttcatggcaaaaaggtgtctgtgggagaaggcagatatgaacttcccggtcatcgcccctttcaatgtgtgcctgcggataatagtcaccgccacgggtgatataagtgacaacgtctcctgcagtcggtaaaccggctctttccctgtcctcccgcatccttgaaatcagccggttcaccttctccacatcacattcctttatggagcaggcacacccttcatgcctgttgagcagagtcagactttccaggtcataaaaattaccgtacttcatattgagatcgtttttgttgatacaatttgacctgacgggcaaccatgtcgcagaacttctgtccgttctccttctcgcttctgaaataggcaatcatgtcccagagattccgattgaagtagccggtccatttttcgtaatagtgacctccatagacctttccgaacgtttcctcgaaaagtgcaggagtcagcccttcatccccgtggtggttgtattgccacagggagacaagcagcagctggttataatccagtgtttccatatctgttcttttttaagtaaaacatcggcctacatgggtaggcatttttatttcttgatgtctttcctgtctgttttccggggattgcggcaaggcttggcgaaagaaaataccgcagcgaagcgaggatgattttctttcagccaacccagcccctgaaaggggccgccttgcacaatcagcccggaaaacggctatctttacagcaagaaatgaaaaagcagacctcggattctctgttctgaagtctgcttttcggtcattgtcaagtttcatgtttttcaggtatgtatctgccatccgtggaacggctgcaatgttacggcaaacgacctgtcaggtattccatgatagagcagacctcccacgatacctgtccttccgtcgggatagtgctgtgtgaagccgaacgagtacggggcatggtcatagtagagtgagatttcgcagggataatcaggattcccttcccaactcttcaaccgttccaagcacttttgaagtgaggtgtcaccgatggattcggcatagcgctttacgttctcgaaatgttcttcattcaggattttcataacttttgtatttttatcagttaaacacgtccggctccgggagccggtatttttatttctcgcctgcctgacagtcccgtggccgtacccgcaaggtttggcgaaagaaaataccgcagcgaagcgaggatgattttctttcagccaaccccgcaggggcctgaccttgtacgggtacacaggacacgggactacctttgcagggtgggaaataaaatatacggttgttttttgttgtgggattttgtgtggattccttagataatcttcctgatttgttcgccattgccggacaaatgctgtatttttgcaatttctaatttcaggattatggaaaactatgtaaagaaagcggcggatgctttccttgtggagcgtccgtacggtatgcgtgtggattacaggaagaaaggattcgtgctgtttaaccgtaacctcaatgtgttgggaaatgcggaacagacccgtctggaagaactacctctggagcggttcaatgtggaggagattccgttggagggtgaagtcgtggaggaacacgcgggatttaccgatgtattcttctataccgatctgaccaatccctatgccggatatgtactgaatttgcaaaagcttaaagcctataaccggttgatgtttccgctggcaatggcgctgaaccgtgaattgtgaggccggaagccggtagcggtaacagctgcatggagcagaccgttaccgccccggatttaattatttgccctctttttctgttatgaacgccagatagacggacacggccttatggcatccggtaaagtccggagtccggcagcccttgattttccggaaactgacggttccgttcctgtcaatgcccctcacatgcctgttgaatgtccctttggttctgatatggatgtcaaaaccgtcccttccggtgatttcaaggaacatttctcccgtgatccgttccccgtccaggaatttctgtttctgttcattgagcagccgctgatgttgctcttcctgcactttgcgctcttccgcctctttctccttctgctccctgcgtttctgctcctgtattcttttatattcctcacgggcttgcaccaagggggtggtgtcaagtccgagagcttcgaacacgcggacggagatcaaattgacgaaggctcctctttccgcactttgaagcgtatccgcaatccagttcctgcaataggtggcggcttcctctctgcaaccttctcccttgaggaaccggcgtgaatactgcccgctagagaaataaacgttttcaatccggcagaccacatggaaacagtcatcgtcttcattcccgtattcgttctttctcgacagggagagatatacattctccgcgtacggctccagttccatataaggagccacgacggtattcccatcagacttgtacttgaatacttttgctttcatactatcgttcagtttgtcggttgttgcatatttcatctataatctctttcccgcttctttcacccttcaggaaggcaaggaagcgcctcaaaaagagccgggcacagtcagttcccagctggaagctttcaccgtctttggtagcacatacagcaaaacgccccagtccgaaactgtcctgttgtggtacgatgtggtaagacaagtcctcgcttgcgttgatgtgcaacccacgacggaaaacatagaaagttttcgggattcttctgtcggtatcgatttccatacgcttgtaaccgtgatgttccaataatcggcccagttccctgtttgtcggaattgtatgtccgatccagtccggccagcttatattttctattgtgtgtccgtaattgtcatataatatgttgaactgttcctggtattcatcgtaaaattccccgttcccgttgcacatttcctccaacgcgatgccgtttttacggacaagggcaaggtcgcccagtccgcacgcgatttcattgagcagcgtgcgttcctcatccctgttctttgccgttccgtaaattctaagccgggaatatcggtgtagcgccgaacgggacggcatatccagtttttcccatattccatcgtttcctatagcctgtctggtgtttcccggaagtccgtaccaccacttgtccaaattgtttgtatccataatttctgaatcagattgttttcaaattctgttttgagtaccatgcctgatacgcggcggcatactcctgacgttcccgttccagggaatttctcatttcaggggtgtacccgagcaggcggatgtatcctccgttatagccggtgggttcgcactttattccggcttcctccagtttgtcgatgcgtttttgggccatttttgcgcttgaatattccttcggccaaaaatagacttcgccccgtgagccgaaacagtcttcccccagaattatttccccggcatacttccggctttcgatgatgccgaaacgcgctttgcccaatgcctggcgcattgccttgtgtgccggaccttccggatgcttgaatacctccggcttgtctttgctgccgagtttgggcggttccaccttgtacggctgtttgtaacttccgattccgagcgtcaggtaaaagttggtatgaaaatagtccgtcatgggggcgctgtcatcgaaattgtacgacatgacgaaatcgcagatattcatcattacatcctttgccctgtccgtcaatgatttgtctgaatggatatgatggtggttgacatcgccttgaacttttccggactctttggtgaacgcctcgaaatccgctttcatcaaccggatatggatggagtggtaattctcccgtctggcagagaacttgtatcccggataggtctccttgagccatgcccgtaccagtcccacgatttccggagcgtgctgccccttgtaattgcggcctttccagcggtattcgttatacacatacccggtgtattcctttgccgtggctcccggatagtcatattcatatccggttgaggtcgagggaatatccggtttttctttccaagcctcaaaaagccttccaaactcggtggtcacctgttgcatgattgcggtgtcaccacccttgtccgggtggtgctccaatgccagccggcggtattctttcttcaagtccgccagagagtgtatgttctgaaaataagtcatagccataagttttttatgcccctgcgaggcggttgataaaatattcccggtagtcaagctcaaaaccgaggttgagacaggccgtttccatgtcatcttctctcaggtcgtccgcctcctgcaattcgcgcaggtaccgtatttcggagtccaggtattcctgtgcttccgtttgaccgcaaccgcatgagttgcagatcagactgataatgtttccctgcatgctgtttgattttttatgtttctgttcctgtttctgaggcctcgtccgtcatatatcgagacggcccgttccaccagaatcctgcggttgtcttccgagagttccaggtagaaccgttccgccgcgccgaatgtgcccttgtctgtcgccacgcaccatttttcccagaaatgcgggtacatgccgccatacacggctttgcattcctcctcgctccaggcgttccacatgtagtagaagaaactggagacggtattttccgcttgatatttcatggttcttctatttgtgattctacattgtttgtttctctcagttgatgccacacagcctcatacatctcatgaagccagtctatgttctttgcgccgagttcaaacgggctgtgacactgcacctcgtcaccgctttctttctcttcggcaaggacggtcaggctgtccgccgttacccggagtcctgtcaccctgcattcatatggttctccgttcttgccaaaccatatcacccagaccggatcataatcctcttccggaagacgaatttctttcatgcagtgagcatggagcaactgccgtatcgcgtcgatgatgtccccccgcagttccttgatcctgccgctgaaatcaacggcttctgacggtaaacttccttttccgcctctttcctgcaaggagagaatccgcgtgtcgggatggatacagaaatcccactccaacacttcatcgtcatcgcgtgtcgtgtggatatcgccgcccaaaacaagaccgcaatcgtcatttaccattctttttgcttcatcgcggtcttctgccgctaccgtgtaagtgccctcgaaggaataccttactcttatgtcatatcttttcatgattctttccatttgattgttgataccagattcattgcccggaaggattaccggatattcaatattgcgctaaagacatgtgggtcaagcctgtaaaacgtcggaaggttaagtgtgaccatcgggtagcttacccagccgctctgacgtttatagcctgtatcctcagccaatttgttggacagaaggaactccatggcatcaggattgttgttgatgtccacgaatgccctgtcaggcagtgagaatgccgccttatcttccaggttaaccgtcaggaccgtgtatatctcatgggtcacgggatctttcagagacaatgccggccagccgttatggtatatttcaatcacgattgagagacggctttcctgatacaggaaagtctcttccatggacggatggtcgcatttgataatttcaaaatcatcctcccctttggtaaatgtcaccatcggataggatacatcgacaaaacattcctcttcccggtaacagagatgttcttttccctctgaacggattatagccaatcgggtgttcatattcgtaactggttttaaaattattgacttgcaagttaattggtcggaattcacctgcttgtttctttaaacgtgtgattgtcaccgcctgcggacatttgggagagttgctgtctcaccgccttgattttcccgatcagttcgtcctcccttcggaatgagggggtacatttggtacgcctcatcccggctccccaggggatgccgccgcatacttttctcaggcgtgccttttcgctttccaaggccgactccagacgggccaacctgcgtcgcaacgattcttcggtcacagttctcatgatctcattgtttttttagtatggtgacggatcggaaagacagtcaccataccgtcgttatgtgtcacgttatattttagctttttcccttttgatgcctctcaggacgtacaacaggtgtaggaacagctccctgtcgtaaatccggaagaagaacggctcgcctgtttccctgaccgttccggtaaacgacacggactcccggttcacgggatattggaagaagttgccgtttgccagcagggtgtgctttttcttcatcacttcgcctaggaacctgtccatatcgtcgtttccctcatagccggagaagtagaggaaatgatgacggcgcaggcttcgcaggattttggcggtttccagcctcacatccctgcctgacgattcgtccgttcctctcatcaggttgcagatgaactttttctcgccatttatgtcaagaaacagataaggaactataattatagaggcatgccgtgcgtggccggagatgaccatcggcttttctttctggatgtctcctttgaaggtaatgttccggtaatggttgtccatctgccgttccagctccttccttggcgtggtaacggagcggagtcccgtgaagtagcgtccgcccgcccggaaacagaaccggtagatgtccgcatgataaggctctcccaggaaaaagaaattccgggtatggcggatggggggcaagacatccatgtagtcgaaatatctttcttccgtaatctcactgaacggggcgcagagggattgcaggtggatgcgtatcattttgcggacggtatttccggacacggctgtgagacacgggttcttttccctgtctctcagttcctccagtgtctcatggtggtagtcgccgtgtattccgtcagacatggtggtcacgcagctgccgtcaaaactgcgtgaatcgactacgaatttcagtttgtcgttattcatggttcagatgttttgaaggttcaacactcttttggcggcactgagggcattggaggtgagctgccgttgccatgccttgtttttgggtgaccagcggaatccggaggatttcagttcctttcgtctgctgtcttcaggaatcctgtcaaacaggatctgaaggcggtcttccccatagttccatacaagtgtcccgccctcgaacggcacttccttgttttcccggctttgcatcgctttcagcttttcgcgcatccgttccgccagttccggcaattggaagaatttgtttctcggtgtgatgacgggtttcttcacccttgcgttatattcggaaatgaagtccacggccctacggacgatttccacttccccgtgattggccaaagtggataccttgttcaggatgctgctgacaaacagggcacggctatagccccggcattgtccggtatcaatcccgtggatggtatcggcactgctcttgatgtcgcgtttgagcgtctgccatgccttttcctgtttctcttcctccggtcgtgcggcttcctttttccgtctgacggtttcaagaacttttttccgccaattgcggaattcttcgtaacggttctgatagcttctgttcgttttttcctgcctgtagtaatcaaatccgctccgtcccgtcaccatcgggttggcacagcgggagaggaccgagagctgggcggacaacttctgccggtaggcggcgatgtatgtatcccgttcctcttccggcatgagttgcaggtcgttgtgcagcccctctccgtaaatcatgatgtccgtctcgccgcgaatctccggattgaaggaactccaggcgtatgcgtcgcaagcctgtttccacatatcatccaaataggcaggatgtttgaatgctacggcttcccagtctttgaagtccttggaatgcaattcattgtgatcttccggatttccgtacaggtgtacatagttgcccgttccatgatgctcctttctgaaatggaacggtacggggggatagtccgtaccttttttccggatcatcgtgaccctgtgtgcattctctatggtaaggtctgctacttgctcttcgcagacctttgctgttgtttcattcataatcattacttttttaaatgtcagccgtaaatcatttcttccagttcatcgtccgtcaacaggcggatctcttcgtccgaacaatagtaagcgatttcttcgtccaaatcgaatgctgtcggatcaaggcttctgatgccatccagcagttcctgttccagtctttctacggaaaccagatagttcccatctttgccttgcacttcccgtgcaggatagctcatttcccgataaaccaacatcgtcatttccggattggcttcctgctgtcctttgcttgtcgtctttctgttcatacctttatttttttaagtttgacatgatcggctccatggagccggattttcgttttcttacttgcctggctgtcttttgtcggggattgagcaaggcttggcaaaagaaaataccgcagcgaagcgaggatgattttcttttagccaaccagcccctgaaaggggccgccttgcgcaatcaacccgacaaatggctatatttgcaggtaagaaattgaaaggacggcaggatattgtgaattatagattacaaaaaaagccatccctagggggacggcttaatgactgaatttgtatacttattgtgcaagacgctccttcacgttgttcattgcttctttcaggctgctgttcatgacccgtgcataatgctgtgtcatacgtgtggaggcatggccgagcatgacggaaacatcttgaagaggcacattgttggcaagcgtgaccgtagtcccgaaagtgtgacgggcaacgtgcgtggtcagattcttcttaatgccgcagaaatcggctatttccttgagatagctgttcatcttctggttgcacatgacgggcaaacagcatcctttcttaatgcaggtcggatgttccttgtatttctccaatatggccaggggtacgggcagcaatggaatattgctgatggaagaagccttcctacggtgttccaatttgacccttccttttcttatccaccagtctccgagattgtcctgtaccagattctctttgttcagactggcaacatcggagaatgccagaccggtgaaacacgcgaagacaaagacatccctgaccagttcaagccgtggaatggtgaatttctttttcattacggtctgcaactcgtcataggtcaggaataccggatcggtctcgtcctgctccatcttgtaaccgtaaaagggattcttgcgcatccattcctttgccaatgccatattggtaaatttcttgaagcatttcatataacggactatcgtgttccggcacagtcccgcctccgttttcaggtagatgtcaaacgcacggatgaactccggtgtcagctcatggaaagtgacatcctcctttccgtaataagaggggatgagcagctgtaatttcttcaccacgttcttataccggttgatcgtgacgggagagtagtctatacccgccagtatttccatttccttgatgccttccctcatggtgccgagcagtgtacgcatttcggtgtctttcccgaaaacacgtttaagaatcagttttggggtaatcagggcctgttccaataccagttccttgtgtttttccaaggcgcgtgcgtgcagttcggcaatataggcgttcagtgccactgatgccctgtccctgcctttactgcatcctttggcggcgttccataagttcaggggtacgcttctttggatacgtacatcgtcatagtctccattgatggttatccgcatcaataccggtgcctcaccgtttttcaacaatttcgttttaagcacgaaaaacagaatgttcattgttccttgtttcatcacttttgttttttgaggtgttacattcaattgtttcgtcaaaaccggatggcatgaggacgtggagcgaaatgttaaattcggtggtttttttgagggacttgtggaaaagccataaaaatcccatttttctcaggttcgaattgccttttgtatcccgggttcgattccttttttttatcccgatgggaaataccgaatttttaaatttctttcactttttcgacttcatccggtcatgtgtgcaaaattactttttcacaccggagattggaattgtcaaacagctgaaaaacaatgaagtatggtgcgtatttatggctttttcaaaagccttaaaaaaagccactgaattggcgaaatccaacttcacaaatatgtagcggaatgcgtagtgagggtaaaaaaagaacccttgaactatctctaattcaagggttttcatgtgtgaaaagcatttatgtactttctttggtggtgtcaccaggaatcgaaccggggacacaaggattttcagtcctttgctctaccaactgagctatgacaccaagatagttaacttgattcagttatttctcttttgcggttgcaaaggtagtgaaacttttggaatacacaaatcttctggaaataaaaaacactgataaaaagttagttgccttattatcagtgttatatggaatgaaaataattttgttatatacagaggtttcttatttctcctcctttaatggattccatccttgtgcttttaattcaaattcttgtccatcgcgggtaatcaatgcacaacctagttccggtttggtgatatgacctatgagacggacaccttccatttgcgaaaccttctcgtggtcggcgataggtacggtgaagagaagttcataatcttcacctccattcatagcacatgtagtcagattcatattgaattcttcagccatcacagctgtttgataatcgatagggatgtgttcttcgtaaacacggcagccgacattactttgtttgcatatatgcataagctccgaagatagaccgtcagagatgtccatcatggaggtcgggacaatatttgcagaagcaagtttctcaatgatgtctttgcgggcttccggttttaactgacgctccaataaatattctttgccggagaaatcaggttgtatgtccttttcacctttcaaaacatttttttcccgttccaatagttgtaatcccatgtaggcggctcccaaatctccactgacacaaatcaaatctgtttctttagccccgttgcggtatacaactttatctttgtctgcatcaccaatacaggttatgctgatggtaagtccggtgagggaagaagtcgtatcccctccgacaatgtcgacattgtattgctgacacgcaagtcggatacccgaataaagttcatccatatcttctacgctgaaacgcttagagagaccgagtgatactgttatctgtcggggagtgccattcatggcatagatatcggaaaaattgactatggcagccttatatcctaaatgtttcaaagggacgtatgtcaagtcaaaatgtacgccttccagaagcaggtctgtggttatcaacatctgcttttcggaagggtaggagagaacggcagcatcgtcgcccactccatatttgctagattcatttttcagttcgattcctccggtgagacggtctatcagaccgaactcaccgagagatgctatttcagttctcatataattcgggatagttgtttaggcacggttaataagttcacgcatgattgtagtcattttcggttgagcggcgtcggcagctttctgaacttcttcgtgcgttacttcaacgatttttccttctactcccaaatcggtaatgacagaaataccgaatactttgataccacaatgattggctacaatcacttccggaacggtggacatgcctacagcgtcagcaccgagaatgtggaatagcttatattcggcaggagtctcaaaagtgggaccttgtgtaccgatatacactccatgctgaactttgattcctttttctttggcaatctcgtccgctttacgaatcagctctttactgtatgcttcactcatatccgggaaacggggaccataagggatattctttccgcgaagcggatgttcggggaaataattgatatggtcagtaataatcatcaagtcaccgatttcgaaatctgcattggtaccaccactcgcattagatacaaacaaggttttgatacccaattcacgcattacacgtacagggaaagttacttccttcatagaataaccttcataatagtggaaacgaccttgcatggctataatatctttattgccaagtttgccgaagatcagtttgccgctgtgcccttcgaccgtagataccggaaagttcgggatatccgaataactgacttcatacttctcggtaatttcattggccagactgccaagcccggtgccaagtatgatggcggtttcgggactggtatgcatcttacctttcagataagctgcggtttcttgtattttctctaacataatcgataatatgttggttaaatttatcttgttgattctgtaaaatctctatttcaataggcaaggcatagatatatggttttaaagcttcgtccaaagccggatgattaatcaggcgtgttgcatccttctcggtagtgataatcaaccgatgctcccctttcagctcattgaaccgttctttgatacgttgcatatcccggctactgaaatcgtgatgatcattgaactccaataaatctatctgctttgcactgtctttcagcttttcgaggatagagataggtgaagcgataccggtcatcagtaatacattcgtatccgttaatgcggataatggaatctctttgttcaccgaagccatctctgcatccgatgactgggctggaaataccggttgcaaattagcatataggaacgaagaaaagaataactgctggtagggataaaggttcagacgttttgcgataatattgtaatcaatgggcttgatatcctgcggacatttggtcacaatgacgatttgtgcccggtttttgccgccgacaggctcacgtaacctacctgcgggaagtaatgtgtcatcacaaaataagcgatgataatctgttaatagaatgctcagtcccggcttgacataacggtgctggaaagcgtcatccagcagaatgatatctattgaaggcttttccaatgcaagcaactcctctatgccatgacaacgtttttcatcgaccgctactgtgacggatggaaacttctgatgtatctggtaaggctcatcaccgatactttctgctgtactttccggaatggcaagcacataacctttcgtgtgtcgtttatatccccgactcaatacagctacattatattgattacaaagaagctttatcagatattcggtgtggggagtttttcctgttcctcctacggctagattacctacactgatgacaggtatatcgaaattctttgattggaaaaaattccagtcaaaaagcttgtttctcacccttaccgccattccatagagccaggaggcaggataaagccatttgtgtatcttgataaagtgatcgtccatgtttgcgttttatttaatattcagttcaaacggaacacgtgcctgaatcatagattgttctttcaggttcgttagcagaccgaattgccggtaatattcgcctaacttacttttcagtaattgtgattctacgtaattagtcggcttcgtatcaagcagagaagacaatacgtcttttttctccggataagacacaatggtgtatcctccgactctggctttggcaatagcaatatccaatgctttatcgattccccccaattcatctactaatcccagttctttggcggcctcacctgtccatacacgaccttcggcgatcttttctattgcctctttggttgtatggcgtccttcggcacaccgggttatgaaagtgtcgtatccttcggctaccatcatttggagcaatgctttttcaccttcactgaacggacgcatgatattgccgaaatccgcatatttattcgtttttactacatcatagcttaaaccgattttatcggtcaattcttttacattgggaaccataccgaagattccgatggaaccggtcagcgttgttggctctgctacgattgtgtcagcaccacaagaaatgtaatagcctcctgatgcggcatagtcacccatggaaacaattaccggtttctttgttttcagttctttcaccgcataccagatttgctcggaggcaaaagcactgccacccggtgaattgacgcggagaacaacggctttcacatcatcattatctttcagcttgcgaaggtcgcgaatgactttggagccgacaataccctcttctgaagttgcagagcccggataatctgtaatttcaccactggcataataaacagctataatattcccgcttttatctttcggcacatttttccttacgtttatcatgtcacccaatcctaacaaagaaagattgtcgtcttcgtctatatctaccaaccttttaaggtaatcgcgtacatcattgcgataaaccaacgtatcggccaatccacatctgacgctctcttctgccggatagaacattaacatacggtcggcataggcttttaatgaatctacgggaatatttcgggaagcggaaacgccttcggtaacctggctccagatagaactgataaatgtcgtgacctgttcacggttagccggactcatctctgtagcgatgaacggctctacggcggatttgtatgtccctaccttgaatatttgcatttctactccaattttctgcaataagtctttgtagaacaaaggggtggaggcaataccccgccattcaatcattcctttaggatttagcagaaccttgtcggctgcactggaaagataataaagcccttgagtgtaagagtcggcataagcgatgacaaatttgccactttccttgaagtcgagcagtgcattacgaatctcttgtaaagaagcgtatgatgtccccaacgaatttgcctgcagataaatccctttgatatcctcattttctttagctttcttgatagacgaaagaatgtcgtccagcccatacgtgttggaatcgtcgttgaacaactgtgataaaatgcctagtggatcttcttgcgtgcgttccaccaacgttccgttcagatcaagtatcataacggagttctttttgactatcgtttccgtatccgaagcagccatgataccaaacagcgttaccatgccgattataaataatacaatacttgacaaaatgatacctgtcactgtggcaagtgtaaatttcaagaaatctttcattatactaataattttttatcagctagttattaagctaacaaagataaataattgagttgatatttattcaataagtcgtgcgaatttttgttttatcacaatgaatctgtataaattgggtttttatcgtttgagatttaagtatatttgtctgtgtccggccttcctaaatagaaagaattctttatttttgcaacgtaacttttaatgcgacatcaactttaatatcatatttaccatgaaaagaaaagccccctttatggctatagctttaacaagcttgtttttgtattcttgtacaccaacagaaaaacaggaagtcaaggattatactcagtatgttaatacttttattggtgccgctgataatgggcataccttccccggagcctgttgccctttcggaatgatacagactagccccgtgacgggagcagtcggttggcggtactgttcggaatatgtttatgaagattctctggcatggggatttacacagacacatctgaatggaaccggatgtatggacttgggagacattctcgtcatgccggtaacgggtacacgtactcgtgcatggaatgcttatcgtagccgcttctctaaagataaggaagctgctactccgggttattatacagttgaactttccgatcctcaagtgaaagcggaactgaccgcttctatccatgcagcccttcaccgttatacttatcataaagccgattccgcttctgttctgatagacttgcagcatggtcctgcatggagggaagaacaatatcattcacaggtcaacagttgtgaagtaaactgggaagatgcgcagacactgaccgggcacgtcaataacacagtatgggtggatcaggattatttctttatcatgaaatttaatcgtccggtagtcgattcgctttacctgccgatgggcaagactgaaaaaggaaaacgcatcattgcgactttcgatatgcaaccgggagatgagttgatgatgaaagtagccctttccactaccggtatagaaggtgccagaaaaaatttggagacggaaattcccgcttgggattttgagggagtgaaaactgccgctcatgatgaatggaataattatttgagtcgtattgacatagacggtacggatgatgaaaagacaaatttctacacctgtttctatcatgcattgattcagcctaaccagatttcggatgtagacggtatgtatcgcaacgccgccgattcaatagtaaaagcgggaacgggtgctttctattctaccttctctttgtgggatacctatcgtgctgcccatccgttctatacattagtgatccccgaacgtgtagatggttttgtcaattcgttgatcgaacaaggtgaagtgcagggtttcttgcctatttggggattatggggtaaagagaatttctgtatgattggtaatcacggtgtatcagtcattgccgaagcctatcgtaaaggattccgtggctttgatgctgaacgtgcttttaatataataaagaagacgcagacggtgtctcatccgttgaaatccaattgggaagtttatacaaaatatggctatttcccgacagacctgataaaagctgaatctgtatcttctactttagagtcggtatatgatgattatgcagctgccgatatggcacatcgtatgggtaaagaggaagatgcggcatattttgcaaagcgtgctgattattataaaaatctgttcgattcgcagacgaagttcatgcgtccgcgtaaggctgacggaacctggaaggctccatttaatccaagtgcgttaggacattctgaaagtatcggtggagattatacagaaggaaatgcatggcaatatacttggcatgtacaacatgatgtaccgggattgatcagtttgtttggtggtgaagtgcctttcctgaataagttagattcattgtttaccgttaagttggagggcgaaagtctgtcagatgtaaccggactgatcggtcagtatgctcatggtaatgagcctagtcatcatgtaacttatttatatgcactggcaggtcgtccggaacgtacacaagaactggttcgtgaaatatttgatactcaatacaagaataaacctgatggactttgtggaaacgatgattgcggacagatgtctgcctggtatatgcttagtgcgatgggattctatccggtagatccggtaagtgcggaatatgtattcggtgccccacagttgccgaagatgaccttgcatctggccgatggaaagactttcacgattattgcggagaatttgtcgaaagaacataaatatgtagatagtattacattgaatggcgaaccatatacaaagaaaatgatttcgcatgaagatattgtaaaaggaggaacgctggtttataagatgaagtaatcaaaagagataatgtaaagcttgcaaaatacatctcttttaaaacgagttattcaagttttaattaaataatttgtttattttatttttgcatcattcttcttataatttgataactactataattaaaaccatgaaaaaactgaagattttattattcttgtgtgttgtcgtatgtacgcttacggtacaggcgcaaaaacaatttactttgaactctccggatggaaagcttcaaacaacgattactgtaagtgacaagctgacttatgacatccgctgtaacggacggcagatccttgctccttctccgatttcgatgacattggataacggagaagtttggggagagaaagcaaagttgtccggcacttccaggaaaaaagtagatcagatgattccttctcctttttatcgtgccagtgaattaagagaccactataatgaactgactcttcggtttaaaaaagactggaatgtagagttccgtgcgtacaatgatggtattgcttaccgctttgtcagccgtgcgaagaaacctttcaacgtggtagatgaaacggtagattatcattttccatccgatatggtagcttctgtaccttatgtaaaaacaggaaaggacggtgattataactctcaatatttcaattcattcgaaaatacttatactaccgatccattatcgaagctgaataaaaaacgtttgatgtttttgccattagtcgtggatgtcggtgaaggcgttaaggttggtatcacagaatccgatttggagaattatcccggcctttatttgtctgctgctgaaggagaaaatcggttgacaggatgttttgctccataccccaaaaagatggtgcagggcggacacaatcaacttcaaatgttggtgaaagagcatgaagcttacattgccaaagtagataaaccccggaatttcccgtggcgcatgagcattgttaccacttccgataaggatttggcagcaagcaacttgagctatttgttggcttccccttcccgtctgacggatctttcatggatcaaacccggcaaagtagcatgggactggtggaatgcctggaatttggatggcgttgattttgtgaccggagtaaataatccgacttataaagcctacattgattttgcttctgcaaacggtattgaatatgtgatacttgacgaaggctgggcggtaaatctgcaagcggatttgatgcaagtggtgaaagagattaacctgaaagaattggtagattatgcagcctccaaaaatgtgggtattattctttgggccggttattatgctttcgaacgtgatatggagaatgtttgccgtcattatgccgacatgggagtaaaaggttttaaggtcgactttatggatcgtgacgatcagcttatgactgcgttcaattatcgggctgccgcgatgtgtgctaaatataaactgatcctcgacttgcatggaacgcacaaaccggccggtttgaatcgtacttacccgaatgtattgaactttgaaggtgtcaatggtctggaacagatgaaatggagcccggcttcggtggatcaggtgaagtatgacgtgatgattcctttcactcgtcaagtatccggtccgatggactacactcaaggggcgatgcgcaatgcttcgaaaggtaactattatccttgcaattcagaaccgatgagtcagggaactcgttgccgtcaacttgctctgtatgttgtatttgaatctcctttcaatatgttgtgtgatacgccgagcaactatatgcgcgaaccggaatcaacaggatttattgctgatgttccgacagtgtgggatgaaagtatcgtgcttgatggtaagatgggagagtatatcgtaacagcacgccgaagtggaaatgtctggtatgtaggtggaatcaccaattggacggcacgtgacgtcgaagtggattgctctttcctgggtgataggacgtatgacgctacattgtttaaagacggagcaaatgctcaccggatcgggcgtgattataaatgtgaatccatacggataaagaatgacggtaagttgaagattcatttggcacccggaggtggttttgcactgaagatcaaataatagttactttagggtctatattctatctaaatattgaacggatttgatgagtctgaaaataggtgggagtgcgtcaaaacttttataaactaaaaatcaccctcgctacaggtagttgtaatgaggatggttttggcaagatgtgagttctgtcccatttctattatcaattaacttcctattgtttacagctttcctgtgtatcattcaccttatatcttattgttttcccttactcatagccattccttcctgttactatctgcgttgttgcaccagagtgaacagatcgtagcactctagtgaacggttctttccactccagtgaacagacttgttcaccggagtgctacagggcagacgcattatattttttactatattctcctttgttattcctttgttatattattgtttattagtatattaccatttgtttatgtcgattgtttttcttatctttataagatatattaaaacataaactaacatgaaaattggcataattgacctttgtaaaccaatagaagatcctaggatgaaccgtaaaaaagtacataaaatggaacccattatctatatatccattgctgctgtaatctgtggcgcccaatcctggaatgagattgaggaatttggcaatgcgaaaattacttttttcaaaagtcgcatacctgacctggagtccatccccagtcatgatacttttaatagattcttcagtataataaagcctgagtattttgagttgatctttcgtaattgggtaaaacaagtctgccaggaggtgaaaggcgttgtagctatagatggcaagctcatgcgtggtccaagccaatgtgatggagaacatactacgggaaaagaaggattcaaattatggatggtttccgcctggtctgccgctaatggactttctttaggtcaggtaaaagtagatgataaaagcaatgagattacagctattccattgttaattaactctttggaactaagtggctgtattgttacaattgacgcgatggggtgccagaaagatataccccagaccattattgagcatgatgcaaattatattatagctataaaggagaataagaaaaaaaattatcaactggctaaacaaatcattgacgattatcaggataaagatgaaataatcaatagagtcaccaggcatgtgtcggaaaacaccggacatggaaggattgagacaagaacatgcactgtagtcagttatggatctattatggagaaaatgtttaagaagaaacttgtggggttgaagtctattgtagggataaagtcggagaggacaatagtagcaacaggagaatatactcaagaggtcagatactatgtaacttcacttgataataccaaaccggaggagattgcgtctgccatcaggcagcattggtctattgagaataatcttcattggcaactggatgttacctttcgggaagactacagtaaaaaggtgaaaaatgcagccagaaacttttcggtggcaacaaagatggcgcttaccatactaaagaatgagaaaacaacaaaaggaagcatgaatctgaaaagactaaaagccggatgggatgaaaaatatttatcacaacttttacaggaaaataatttttaatgcgtctgccctgcggagtgctacgatacagatgcaggtaggaaaatatgcgtatatctgctctatatactttcaataagcattgataatatattgtaaagcagtgtgtagtctgatattcatcttggtctttagtttaaatctagcttgagtatttataggataaatagccaaaatgctatgagaaatacgttgataagttatgagagatgcttgattttatgaacaaaatcatggaaatactgtaagcgtctcggcgatgccgtcccccccctcaaaaaaatagaagtagcatctcctctttatgtttcgatcctacttctattttctttccatttgtccggcaataaatttctatatacctttatgtccgtatttggtggtagctttgccgctttattgattacctccgtgatatattcgaaggtatttattccctgcattctgcatgaacaggccagcgaataaaataaggcacctctttccgcccccttatggcttccaaagaaaagggaatttcttctggacagtgatatatatcggttgtaccgctcgaccaaattattgtccaagtagtaatatccttcagtaaagatgcccttaatggcctcccattgcgagagcatatagtcaaccgctcccgccatctcacttttgggaagcaagtcaggcttactctttatcctgagcagttcccgttttatttcgctgagtatctgcggcgcgtaccttttccggtgcctgaggttatccttgtctgtccatccctgtcgaccaacacagtgttcatgttctttttgatacagcttgttcgtcagttcaacgatcttttgtgcgtccggttcctcccgtacctcaaggaacttccttttgacatgctgcaggcaggtgattcttttaattcccggataggcgtcactttccaattttctatacggactgtatgcgtcactttgtactgtcccctcatattcggaaagaaggtcaaaaagcaccttcccgctacgggagccattctcgtagaggtacagtatcaatttctgcttgaccgcgacggccgcccagatatacccctgccttacccctttgcctctactgttcttctcttccacaaggactttgtggtaactttcatcacaacaaagataagagtcttcaagcacggccattctcaacgccctgtaaaggttttccaacacttcggccgctctgcccagaaggtgatgcgcggtgggcttttcaagctcaaatccgctttcacggaagaagccgataatccgctccacactcatagagtagatatagcgcaactggcataaacccgctacaaaagatccgtcgtagtttgagttaaggaaaggtgcctggggagcggaaccgcagaagactgttccgtttaagctataaatgttttgccggtagacaagcttttcaaatttcggaggagtgtagatataacggatagaatcacggtatcccatgaatttggcaagggagatgctgaaaaggggatgttcgggattgacttcgattaccttctcttccagttcaaaatgctccttgcgtttggatttattgtttccccgctctttgggagaagggcatggacgggagggagccgtctgccggaccgcctccgccttacccggtacctgcttttcagactcgttgcttataagtttgcctaagccacgactgatgttctcctgttttttcagtttaccatttttcaaggtcaacgcctcttctaatgaatggacactttcggttaattgccggacctgcatcgtcaattcgcagataagcagctgcccatgctcctcacgcctggcagccgcttcaagctgttcttttaaagatctgatttgatcctccagaagttctatgagccggtccttttgcatgtgtcaaagataagaaaaaagaaccggaagacaaataaattagcgaagtattcgtaatgtaatatattgatatatagattgttacgtcggtgtgtcacttcaaccggaaccgtttcctgcatttggcggaccggagcgagacgccctgcattatcaaaagaaaagtcttccatgagagctcataagaccctgtatcgggattaaaacggggaacctcaaaggtaccttcttccagtcgtttctgatagagaataaaaccgtccgtatcccaccgcaaaattttaaccatgtcacgtttgcgggagaaaaacacaaatacatcacccgaaacgggagaaagggacatgtcggacttgacaagccggtaaagcccggtcatgcctttacgcatatcaacataatgctggcacagataataatgcatgccatcggttaaagcaaacatgacttttcctcctgaattttactgttataacggtcgataaaacggttgacgctaaaagaactgccttgcttgatagagacagtcactccgtcagggaaagtgatggtaaccccgtaaagcatatccggagaggaggaaggggaagagcagaccggaaacaaacggctgaaagaggaggcaggctctttagcggtggtgacggaagaggagggacgcaactcacggatactgatgccgtgacgggaaagccaaagacacataccatggtagttgacatgtcgttcacggcaataactacgaagagttaaggcaggagaagaacataaacaggatttataatccgataaggtacgggtatacaagtcatgtgcagtcataagatgtggttttttattatgacgcaaagctaaaaggaaaaattaagatagaaaatatggcatcgccgagacgcttacgaaatactatgagagatgcccttttgtttttttatttctcatagtattatctaactgatttacagttaattattgtgtgttatgagaatatgagaaatgaaaaataaaaatccttttcagtaaagtgaagattttacgtatcattcttgtataagtatcatattaatgcatcaactaaggaatggaattcactataaaaccgctatctcttatatctttctttcctcttattttaatgagctgattctctaattactctctaacctaacacaaaccgatccttgacgcagttacgcgctcgcgtgttatataataatgtgcagctctctcgtcgtttcctcgcacaatctccccatacataaaaaatatgttctacgacatcgttcagcatcaatgctttagcaatttcattccaaaaaaacttcaaaaaaatagttgaatatatttggattatatccgaaaagcgggtacttttgcacccgctttccaagagaggacagccttgcagaattgacctaatgacaaagcgtaggaccgctttactttaagaacaaaaagatccagaaaagtttggattataataaataaagtttttatatttgcagtccgattcgcaaagagacgcggttttccgtttatcgttttcgtcccttctttccctttcgctaagagagcctgagaaacgaaccgaaaaagaaaaatgaaaaaaacttccgaaaagtttggtagttaaaataaaaccccttacctttgcacccgcttttgaaaacgaagcgcaagttctttgaaatattgataaacaatacaagtagtacaagattaaaatagaaccgtcaatgcttatatgataaatataggtatataagatagagtcaataaattgtacggcatcctgaacagagcaagaaaatcatcttaacagatgaaaagatacttttacaatgaagagtttgatcctggctcaggatgaacgctagctacaggcttaacacatgcaagtcgaggggcagcattttagtttgcttgcaaactaaagatggcgaccggcgcacgggtgagtaacacgtatccaacctgccgataactcagggatagcctttcgaaagaaagattaatacctgatggcataggattatcgcatgatgatcctattaaagaatttcggttatcgatggggatgcgttccattaggcagttggtgaggtaacggctcaccaaaccttcgatggataggggttctgagaggaaggtcccccacattggaactgagacacggtccaaactcctacgggaggcagcagtgaggaatattggtcaatggacgggagtctgaaccagccaagtagcgtgaaggatgactgccctatgggttgtaaacttcttttatacgggaataaagtgatccacgtgtggatttttgtatgtaccgtatgaataaggatcggctaactccgtgccagcagccgcggtaatacggaggatccgagcgttatccggatttattgggtttaaagggagcgtaggtggattgttaagtcagttgtgaaagtttgcggctcaaccgtaaaattgcagttgatactggcagtcttgagtacagtagaggtgggcggaattcgtggtgtagcggtgaaatgcttagatatcacgaagaactccgattgcgaaggcagctcactggactgcaactgacactgatgctcgaaagtgtgggtatcaaacaggattagataccctggtagtccacacagtaaacgatgaatactcgctgtttgcgatatacggtaagcggccaagcgaaagcgttaagtattccacctggggagtacgccggcaacggtgaaactcaaaggaattgacgggggcccgcacaagcggaggaacatgtggtttaattcgatgatacgcgaggaaccttacccgggcttaaattacatttgaataatctggaaacaggttagccgtaaggcaaatgtgaaggtgctgcatggttgtcgtcagctcgtgccgtgaggtgtcggcttaagtgccataacgagcgcaacccttatcttcagttactaacaggtcatgctgaggactctggagagactgccgtcgtaagatgtgaggaaggtggggatgacgtcaaatcagcacggcccttacgtccggggctacacacgtgttacaatggggggtacagaaggcagctacctggtgacaggatgctaatcccaaaaacctctctcagttcggatcgaagtctgcaacccgacttcgtgaagctggattcgctagtaatcgcgcatcagccatggcgcggtgaatacgttcccgggccttgtacacaccgcccgtcaagccatgaaagccgggggtacctgaagtacgtaaccgcgaggagcgtcctagggtaaaactggtaattggggctaagtcgtaacaaggtagccgtaccggaaggtgcggctggaacacctcctttctggagcgatgccgtaactgtcataaccgtgacagtcacttatagactttaaaggttctgttttttgtactactggtacttgtttatttatagatatagatcaaccatctatagtattatagatagagataaacaagagaaaaaagaagccgagtctagacgaaaggtagacaaggttgaactagtcctatagctcagttggttagagcgctacactgataatgtagaggtcggcagttcaactctgcctgggactaccaagctcaagaaggaggaatagtgagagtaaaaagctaaaaactaaaaacaacattcttgaataacctcttgggggattagctcagctggctagagcatctgccttgcacgcagagggtcaacggttcgaatccgttattctccacgatctctgaaaagagaaacgatctttgacatgatgatacaaaaagtaaaattttagtaagagctaaaagtatatatcgaaccgtacgtttccggtatacagactagcaatagttaaatatgcctggaagtcagtttgaaagaaagtaatcaagggcgcatggcggatgccttggctctcggaggcgatgaaggacgtgataagctgcgataagcttcgggtaggtgcaaataacctttgatccgaagatttccgaatgggacaacccgtcattctgaaggaatgacatcttgcatggcaagaggctaacgcagggaactgaaacatcttagtacctgcaggaaaagaaaataataatgattccccaagtagtggcgagcgaacggggattagcccaaaccaatgttgttacggcaatattggggttgtaggaccacgatgtcgcaagaaatttagtgagaagaaccctttggaaaatgggaccatagacggtgatagtccggtattcgaagctaaacgaagcgtagtggtatcctgagtagcgcgggacacgagaaatcttgcgtgaatcagccgggaccatccggtaaggctaaatactcccgagagaccgatagcgaaccagtactgtgaaggaaaggtgaaaagcacttcgaacagaagagtgaaatagtccctgaaaccgtgcgcctacaagcggtcggagcttcgtaagaagtgacggcgtgccttttgcataatgaacctacgagttactttttccggcaaggttaagcatttaaaaatgtgtagccgaagcgaaagcgagtcttaatagggcgactagtcggaaggagtagacgcgaaaccaagtgatctacccttggtcaggttgaaggttaggtaacactaactggaggaccgaaccgataagcgttgaaaagcttccggatgaactgagggtgggggtgaaaggctaatcaaacttggagatagctcgtactccccgaaatgcatttaggtgcagcctcgggaattactactgtgaggtagagcgactgataagatgcgagggcttcaccgcctatcaagtcttgataaactccgaatgcgcagtagttctatcccgggagtgagggcatgggtgctaaggtccatgtcctaaaggagaagaatccggaccatcagctaaggtcccgaaataattgctaagttgaactaacgaagtcagattgctaagacagctaggatgttggcttggaagcagccattcatttaaagagtgcgtaacagctcactagtcgaggagtttggcgtggataataatcgggcattaagcaatttaccgaagctatgggatgtgtaaacatcggtaggggagcattccactctgcgtcgaaggtgaagcgtgagctttgctggagcgtgtggaaaagcaaatgtaggtataagtaacgataaagggggtgagaaaccccctcgccgaaagactaaggtttcctgatcaacgctaatcggatcagggttagtcgggtcctaaggctcagccgaacggtgatgccgatggcagaacaggttaatattcctgtactaccttaaggagtgacgtggagacggagtcgtgacagcgccgcggactgacggaatagtccgttgaagggtgtagatgttgatctttgcaggcaaatccacaaagagagtcgaacctgatagtataccaaattcttcggaataaggtaatagtgcgtgtaagcatactcccaagaaaatccgctaaacttaatctttaaggtacccgtaccgcaaacggacacacgtagtcgggttgaatatactaaggcgcttgagtgattcacggttaaggaactaggcaaattgaccctgtaacttcgggataaagggtcccaacgagagttgggcgcagagaataggtccaggcaactgtttaacaaaaacacagggctgtgctaaattgaaagattacgtatacagcctgacacctgcccggtgctggaaggttaagaggagatgtcatcgcaagagaagcattgaattgaagccccagtaaacggcggccgtaactataacggtcctaaggtagcgaaattccttgtcgggtaagttccgacctgcacgaatggtgtaatgatctggacactgtctcaaccgtgagctcagtgaaattgtagtatcggtgaagatgccgattacccgcgatgggacgaaaagaccccgtgaacctttactatagcttaacattgaatttgggtaattgatgtgtaggataggccggagactttgaagcaggtacgccagtatttgtggagtcgctgttgaaatacggccctttgattatttgagttctaacccgtggtacggggacactgtttggtgggtagtttgactggggtggtcgcctccaaaagtgtaacggaggcttctaaaggtgccctcaggacgattggtaaccgtccgtagagtgtaatggcataagggcgcttgactgggagacatacaagtcgatcaggtaggaaactagagcatagtgatccggtgtttccgcatggaagggacatcgctcaaaggataaaaggtactccggggataacaggctgatccctcccaagagctcatatcgacggaggggtttggcacctcgatgtcggctcgtcacatcctggggctggagaaggtcccaagggttgggctgttcgcccattaaagtggcacgcgagctgggttcagaacgtcgtgagacagttcggtctctatctatcgtgggcgtatgaaatttgcgtggctctgacactagtacgagaggaccgtgttggactgacctctggtttaccagttgtgccgccaggtgcattgctgggtatctaagtcgggattggataagtgctgaaagcatctaagtacgaagccagccacaagattagatttcttagggtcgtcaaagacgatgacgttgataggatgcaggtgtaaaggtggtaacatcacagccgagcattactaattgcccgttcactttctttcggacatgtacggggcgcgatatatacgtttagcttgccagacactgaagttttacttttcatcatgtcataaccttattgaatttcttcaggtggttatagcacgagggttccacctcttccccattccgaacagagaagttaagcctcgtcacgccgatggtactgcgtaacagtgggagagtaggtagccgccgttttttaagaagccccttgattcattttgagtcaaggggctttctgttttccggccgttcctgttcccgatctgaaagattacttccctgaaaaatcacacagttataccctcattttattccattttttcacttttcgtataacaaaatgattttatattactcaaacgagaaagcaaatatagtgaatctaaattacttccctgttttttgatttatcaatggtactttggtatgcttgtatttcctcttttactactcttttttattttcacctctctattatattgtttttcataatagcataatcctttttttaatcagtcacacttacgcggattccgtcatgaaacctttaattcaatatcagagaatgcagagtagaagccagttaaattttctgttgatttctaatattttatattgcttcttctcggataaagttataagttaagtatattccaaacattttgttaatgaaaaacttttaatattgtaacaatttttaattttgaaattgtaatgttatttattatatttgcaaatatttttgcagaagaaattgtagcggagagagaatatataaaaagatattgaatggggttgtttatattgaattcattttgtcgggatgaattattgataaaaagtatttatgatctatatttaaaccttaaactatgattgttgaaaaacacttgcatatagacttgataaagaaggtaaaacaaggttcgtatgaagattttacccgtctgtactttatgtatgcggatttgctttatggttttgtgctgaacttgactaaatctcctgatgacgctgaagatattctgcaagaaacctttttgaggatttggcagactaaagaaaatctttctttagagacttcatttaaatcctatctttatactattgcacataaccttatcatagattcatttcgtaagaaaattgatagtgttgcatttgaagtttatattcaaagtgacgcatatcagaattatacagaaaataatacagaaaatgaagtttattttgatgaatttcttgataaactgaatgaagctaaaaagaaacttagtagtaggcaattggtgatttttgagttgagtcgtgaaaaaggatgttcgattaaagatattgccgaaaagatgggagtttcggaaaaaacagtgaagaatcaattgactcttgcattgaagactttgaaatcagaattatctctcttgcattatttgttattagtcttgctattgttaaggaacgaattttaatttatgttttataacatgtaaattgagtcgggactatttgggggattttgcgtatttcttataaaacagaaatatgaaaaataatttgctccaagttttattgcgacggtttttctcagcaagaattagtccggccgaatacacagtccttaaatcagaagttcaaaaagcaacagatgaagctatggactctgcattggatattttgtggaaggagcaaaacctgcaaattccggtgatggatgatgctgttaaattcagggttcttaataatattcaaaatcagataacggataacaaaccttcgcataatttttcctggacacgaattgcggctacaattctgataccgcttcttatttcggcagcatcattttattacttttcaggaaagttcaacaggcaagaggatgtttttaccgtatttgcagaaagaggacaaaaaacacaaatatttcttccggatgggactcaagtttggcttaattcggattcttatctcagctattcttccgtattcaatcgtgataatcgtgaggtgactcttaaaggcgaggctttttttgatgtaaccaaagatgatgagcatagttttactgttaaagcagaaggtattaatattgtggtacacggtacagctttcaacgtttctgcctatccggatgaagaaatggcaactgtttctttgctcagaggagctgtcacggtggagaatgctgtagagagggtacaattagaacctggtcagcaggtacagataccgagagacagacaatcatggaaactattcccctgtgatgttgaaatggagtgtttatggacacagaatatgctcaggtttgaaaatactccggcggtagaagtgtttgcgaagttggaaaaatggtatggagtaaatatccacgtagaaaattcggattcgtctgttaaatatggatttgttctgaaaagtgaatcattaagagaaatattagatctaataaatagaataacagcaattgattaccagataaacggagaggaggtgaacatcagatataagtgaaaatataaataaaacatgaaaaatatttttccatgttttctataaaagcatatataaaattaatcatttctttttttacttagtcataatattatgggaaaaataacaaaaaggatacttgctaatatcttttttttcttattgatatttcagtctttgagtgcccaaaattctcaaagaatagatttatctttgaaagaacaaacgcttaaagtctttcttgagatagtcgaacagaagacgaattatacattcatgtataataatcttgatttggaacaaaaaatatcggttcaagttaaacaggctactattgatgaactgttgaaaaaagcattgactccattacacattaattttgaaattgccaatgctaaaatcattttaacgaaacaagaccaggtaaataatggttcagtcacagtaacagtgaagggatctattgtagacgaagcgggtgagcctctaattggagttaatatagctgcaatgtccacaggtaagggaacgatcagtgatatcaatggagagttcacggtcgaagcggctaaaaatgaaattttgaatatatcttatataggttatgtttcacaacaaattaaggtaggtactcaatcatctatacatgtaatccttaaagaagatactcagactttggacgaagtggttgttactgcattgggtatcaagcgtgcagaaaaggcattgagctataatgtacagcaggttaatacagacgcggtgacagaacataaagatgccaactttgttaattcccttaacggtaaagtggcgggtgtcacaattaatgcttcttcatcaggagtcggaggcgtatctaaagttgtaatgcgtggaacaaaatccatcatgcaatcttccaatgcattgtacgtagtagacggtgtcccgatgtttgccggtagtagcaaaggtgggggaaaagaatttgattctcagggagctaccgagcctattgcagatatcaatccggatgatattgaatctatgtcggtgctgactggtgctgctgccgctgcattgtatggttcggaagctgccaatggtgccattatcattacaactaaaaaaggaaaagtcggtaaggttagcatatctgtaaattcaagtatggagttcaatcagcctttcgtaatgcctcgtttccaaacccgttatggaaccggtgtaggaggaagcttcctggatggttcagaccgtagttggggagaaaaattaacagtagctaattatcgtggctatgatcctaaggatgattatttccagactggtattatcaacacggaaagtgtttctttctctaccggtacagaaaaaaatcaaacttatgcatcggctgctgccatcaattcaaaaggtattactcctaacaataagtacagtcgttataatttcagcgtacgcaataccacttctttcttgaacgacaagatgactcttgatatagctgccagctatattttgcaaaatgaccgcaatatggtgaatcagggagaatataataacccgttagtgggagcttacctatatcctcgcggtaatgactgggaagatgcgaagttgtacgaactgtatgatccggcacgtaaagtttatcttcaaaactggtcgatcggtgatgctgcaatgacgatgcagaatccatattgggtgaactaccgcaacttgcgtgagaataagaaagaccgttatatgttgagcgcaagtttgaattataaaatattggattggctgactgtttcaggacgcgtaagtctggataatgccaataatgattatacagagaaattttatgcttctaccaatacacagcttacggaaggttcttctcgtggtttgtacggtataaccaagacttcggacaaacaattgtatgcagattttctggtaagtatcaataagaactttggtgaagactggaatctgagtgctaatatcggtggatcatttactgatgtgcgatcagatctaatgacagtccgcggtggaattgctgatggcagtgatgcatttccgggtgagcaggtcggtttgaccaattatttcgctattcagaatttaagccagaaagcccgtcgtctgcaagaaggatggagagagcagactcagtctatttatgcttctgctgaattgggatataagagtacttattatttgacacttaccggacgtaacgactggccttcacaattagccggacctaattctacatcaaagagcttcttctatccgtcagtaggtttgtctgttgttctctcagaactgatgcctaatttgaataaagattatttgtcttatcttaaactgcgtggttcgtttgcctctgtcggttcggctttccaacgttatcttgccaatccgcgctacgaatggagcacttctgccaatcaatggagcgtactgactcaatatccgatgtattcattgaaaccggaacgtactaattcttttgaaatcggttttaatgctcgtttcttgaaatattttgagttggatgctacttattataatgcaaaaactgaaaatcagacttttaatccgcaacttccgattaataaatattcaaaaatgtatattcaaaccggtagcgtacgcaatcaaggtatagagcttgctctgaattttgaaaatacatggcgtaatttcacatggatgagtggtttgacttattcaatgaataagaacaagattgaatctttggcggacaatgttatcaatcctataaccgggcagcttttctccataccttcacttgatatgggcggatatgcagatttacgttttatcctacgtgaaggtggcagtatgggagatttatattcacgtacagatttacgtcgtgatgctaacggtgctatttatatggatgaatcgaataacgtatatactcagaaaatagataaccccgattcttatatcaagttgggaagtgtattgccgaagggaaatcttgcatggcgtaataactttatgtggaagaatttccatgtaggattcatgatttctgctcgtctgggtggtgtagtattttcaagaacacaggctatacttgataagtttggcgtttccgaggcttcagccgatgcgcgtgataatggttttgtattgattaatggaaatgacagagttaatccggagaattggtatacaacagtaggtagcaccgctgtgccgcagtattatacttattcggctaccaacgttcgtttgcaggaggcttcgataggttatactattccgagaaaatggctggctaatgtctgtgacattaaagtttcattgataggtcgcaacttgtggatgatttacaacaaggctcctttcgatccggaggctgtggcatcgacagataatttctatcagggaatcgacaacttcatgatgccttctttgcgtaatgtaggtttcagtctgaatttcaaattctaataaaagtgactatgaaaaagatattaaatacatttattttcgcttcattaatggcggctgtgtcatcctgtaccgccaagtatgaggatatcaattcaaacccttaccaaccaggcgacttgtctgccgacgactatgcgctgggttcggccatgaacaaccttgccggttgtgtggtctctccggatgtcaatacggcacagtttacagattgtttgctgggcggtcctatgggaggatattttgccgattccaaagcatcatgggaacgtacgatttcgaactttaaccctgaagatggctggacaaatgtttttctgaaaagtgataaggtacttccggtactttattccaacttgagtattgtagaggtagtatcacaaaatacgaacaacccggttcctttggctattgcgacaattataaaggttgcagccatgcatcgtattgcggatgcttacggaccgattccgtattctaaaataggagcggatggttctataacaactccgtatgattcggaacaggaagtttataataaattctttgaagaactgaatcattctatcggtgtgttgaatgagcatccgaatgaccgtttgactgcttcggccgactacatttatcagggtgatgtgaaaaaatggattcgttttgccaattcgcttaaacttcgtctggctattcgcatagccaatgttgacaaggtgacagcacagaagatggcggaagaagctgttgacccccaaaacggtggtgtgatcgaacagaatacagataatgcggcatggagttatttctccggttctgtaaataaccctatttatgtggctaaggaatacaatcatgtcgatgttcacaaagaagataatagcgcctgtttgacaggtggagatacacatgtagcagccgatattatctgctatatgaatggttatgaagaccctcggcgggaaaaatattttgtcaagtcggaatggaaaggacatgagtatgtcggattgcgtagaggtattattatcccggtgcttgaaactaccggacacaaatattccggaattaatatgaagccgaatgatccgttatattggatgaatgctgcggaagtcgctttcctgcgtgcagaagcggcggctatctataatttcaatatgggaggtgaagccggtgagttttacaataccggtattcgcttgtcattcgaacagtggggggcggacggagcagaggaatatctgaataacgagactttacgccctgaaacttatgtagatccggacggaaagaattcttatgacagagacttgtccagaatcactgtgaaatgggataatgctgcttcaccagaagaaaaacaggagcgtattatcattcagaaatggatcgctaactggcagttgggtaatgaggcatgggcggattaccgtcgtaccggctacccgcatctgattcctgctactgcggccggtaataagagtggcggtatcgttgactcggaaagaggtgcgcggcgtattccttatccagcatcggaatatggagataatcctgtaaatataaattacgccgtggctacttatctgggtggccgggatgatatgggacgtgatctttggtgggctaaaaaaacaaagtaatataataaagtagataatgtttatgaaaaatacatttggatatagcggactgtgtgttgcgatatgcatgactatgtcactctcattctgttcttgtgaggactggacggatgtggagagtctggatatacatactccttcgcttgaagaacaaaatcctcaactatacgctgattatctgaaagatctgaatatttataaagcaagtgagcataaattgactatagtatctgtggagaatgtggcagatccttccaaacaggccgaaagattgtccgctttgcctgacagtatcgactatatcagtttgaataatccggataaattgtccggaaatatgctggacgaaataagaatagtcagagagaaaggtacgaaggtggtgtacagtattgatttttctaaatttgaggaagaatggaaggagatgaagaaagctaatcctgacttgacggaagaagaaggtcgggcttatttggacaaacgtacagatgagatgcttgctttagcggataattatgatggtattattgctgattataccggtcgttctttggttagcttgaaaggtgaggagcttgaggtatatacatctcgtcagacaaacttcttgaataaactgaaagagtggaagcaagcatccgataagtcgttgttcttttatactaatgtacaatatcttacagctgaaaatatgggaataatagggttggctgattatattattcttaaaacagctttgtcaacaaatggtgatgatttaagtgtcaaggcgttattggctgttcaggcaggagaagatgcgaaagaattgtatgaagggataaaccctgtccctgctgaccgttttattgcgtgtgttcaactaccgcagccggatgacaagaatcaggtggtaggatattggaatacagttgactctgaaggaaataaaactttagctactcagggagccgcatggtggaatgtgcaggcgtcaactggatttgaaagaaaaggaatgtttgttatgaatgtacaggatgattattataataatacgttcttttcaattcgtgaggttattagtataatgaatccgtcaaaatagaagaagatatgaaattacataagtatatgtttgcttccctttctttttgctcattagtattgggaagttgccaaaataatgatattgatgatgaacaccattatgataataaggtatttgtcacttcccagcaagttagggatgatttgttgattaaagagactatttcggaagctacccggtccatatcttatcgcttggctgatccgttggatagagaggtgaatatttcttttgatgctgctccacaattgactgctgcttataatttggcttttaatgataacgcacaggttttggctgctgattattatgagattccggtcaagtcggttacgattaaagcgggagacatcagtagtgatgatgttgttgttaactttaaaaacacaaatcagttggacaagtcaagacgctatgtgttaccggttacaataacggatgcggatatcgaggtacttgatagtaaaagaactgcttattttatattcaagggtgcggcattgatcaatgtggtagctaatattgagaaaatgtatttccctatttattgggatactgatgtacattctgtaaatgttgtaacagtggaagctttagtgcgtagtaatgattgggttgcagggcgtgataacgcactgagtacagtatttggggttgaaggtgagttccttgttcgtattggcgatgctgatcgtccgcgtgatcaattgcaatgtgtagctcccggtggaaatttccctgctccgaatgctgttgccagtttgcctgtaaaagaatgggtgcatattgccatcgtctatgatgcaactactcgcgaacgtatctattataaagatggagtgaaagtttattcggataatgctgccagtcgtgctgtaaacttatcatcaaatggctgttatattggtaaagcatatgatgatacgcgttggctgcctggtgatatttcagaagtgcgtatttggaatattcaacgtagtgctgaggaaatagctaagaatccgtatgaagttgatcctcattctccaggactaatagcatattggaaatttaatgaaggaactggaagtgatataaaggatcatacaggaaatggtaacgacatcagtgctgttggtggtactccaacatgggtaaatgttgaacttccgcaaataaaataattacaaacttaatataggattgtacatatgaaacgaaaagatatatatacgttattgtttggtgttttgtgttgtgcaggaacatcattatgtttttcttgtgctgatgatttagagattggaaagcagtttgatgaatcggctttggagggaatttatgaaaatagagtttttctttgcgacgcttcatctaataaagtcaataatattattgaattatatacttctaatcagtattcaactaaagttcgaatgtctttatcgaagaattcttcagctgaaacttcagctaagatagttatagatgaatcttatttggaaaactataatcaagaatataacacagattttgaaatgcttccggcaagtgcggtcatttttgctaatgatggtactttaaactctggaaattgtggaagaagtttagaggtggaaatgacaataaagatttcagatgatttggaggcaggaaagacatatgctttacctctctcaataacggaacctacttctgaccttacaataaaaaatgagcaagatcgtcactgtgtatatttagttaaggacatgagaaagtttggtgacgctttcaaaggagaggataagccaaaaggatttttgttttttgaagtaaatgatgtaaatccattaaatgctctttctttccaattggagaacggtaaatatttttgggatgtagttgttttatttgctgctaatatcaactatgattctgaagcagggcgtccatatataaaatgtaatccgaatgttcagtatttgctagataataatgagacacttttgcagccattgcgtaaacgcggtataaaagttttgttaggtttattgggtaatcatgatatggcaggattggctcaactatctactgagggggctaaagtatttgcgcgtgaggttgctcaatattgcaaggcttataacttggatggagtaaattatgatgatgaatattcgctttatccagatcttggtaatccttcatttgctactccttctgctcaagcgggagcacgtctctgctatgaaaccaaacaggtaatgcctgataagttagttacagtttttgcgtatgggaacatgtacggagttgaatctgtagatggagtggatgttgatgagtggattgatatagttgtacctaattatggttcagcagcttatcctttaggtaatatggataaatggaagtgtgcaggtttggctgcagaatttaatttgcatggtggtggctctttggatagttatggcgctcagaaaatattgagtggtggttatggatggcatatgggatttgctgctaatccgaataattatacaactatttttcaacgtttgagcggtgcttatgaattatatggctctaaattgaaagatccgacaatcttttataagaaaaatgaaactactccatctaagtatccggaggatttatgatagttaatgttagagaagagtatttttaatgtattagcaattattcgaatgttgtattaacttgaaaataagaatatgagaataaaaaaacttttttatatacctgttatctgtatcggtatattatcttcctgtctggatgatgaaaatttggatttgaagaattttcctatcaaccaaccggaaatattagttcaaggtagtaatgatgacaaaaatgtcgttgctacttatctgagtgatggcactttgaagttggatgctcctttaacaagaacatatgtgttccgtttcaaagcttctccagaagatatgactgtaaattttgaaccaatttgttctaacatcccagcagagaaagttgtcttgagtacttccgaggttttattgactgccggagaaacagatgcggtggttaccgtttctttgaaagacgatgattttaattttgcagcttctactttggaaaaagaaatctatatacttggagttaaggccaatgcaaaaggatttaatatgggagaagagtctgcagaaagtaagattacaattgaaaaagaggcatattgtgttgcggtatctttacatggagaaaatcaaaatagtgtctcttttgatcgtacatttgtcgatggttccattgaggaacaagaacctattgtctataattttaaagtaatgttggataaacctgcaaacaaggatattgctatacagatacttacagaaggaattgctgaaaaatatttaggaaatgtgactgttactcctaataagatcgtgattccagctggtcaaacctcttcagaagaagtgacatggactataacgaatgattttttgcttgaggatgccatgcctgctacttttttgataaatctgaaattaggtatagaaacggaagatactacagtaaaaaaagaaggggagaattctatatctataacagttatgaaaaaaatgctgaatatgggtgctgttgatgtccttccccaagagtggaatatgattaataaaaaggattgctctgctattgaactgtccaaattttcaggggatggaagcatattgtttgactctcttacaggaggaaatgcttcactttattgttctagttggaatttgccggcaagctttgtagtagatatgaagaatttgcatatattaaaaggtataaaaatagattataattcttattcctctactcctgcaggtcctaaaaatatcagagtatgcacttcaaaggataaaattcaatgggtagaacaagctgatttgaaagaattgcctaatagaaatgaaaacttgttggagttttatacaggagtggaaaccagatatgttaagttggaattttttgcattgcattcatattccattaatgttgctgaggtatctttgtatgaatagtgactttttattgtttaaattttagaaggatatttagaacaatattagggtaaaatgaaacgcaaaatttgaatattattgttcggattttgcgtttctattttttagagaagagttttggaaataagcttctttgtttctttattttgatggaatttatgagagacaataatagaaagaaagttattgatgtattttctcgcatgtttgaggtcaattattctaaagtaaagaatttggcttatagtttattaaaatcagaactggatgcagaagatgtagctcaggaagtttttactaaactttgggagcagcaaagtatatggattgataataaaagggaacttgatgcctatattctgattatgactaaaaatatagctctgaatatatctaaacatcagaaaatcaggttggaatataaggagcgttttttggaagaatcatcagatttgacagatcgtgatttgttggagagtatttattttcgtgaaatattgcaaggtatttatttaaaattagaaagcattcctgaacgcagaagaactgtatttgaacttagtcgtttttatgggaaaagtcataaagaaattgcagacaagatgaatatatcagtccgtacagtagaacaacaaatatatttgacgttaatcgaattaagaaaggttttgggcgcatttgccggatgaagcatgaggaagaaatttgaggatgctgtgccacatgttataattcatgttaatattaacttgtttttatgcttttgatgttgttttgtaatgatttgattaatacatttgccatcaattattgctaatgcgaatcaataatattaccagttatgaagcagatctttaccttgacttttgtcctgtttactttgctttttcagagttgccgggataatttgaatgttcctactcctgcaagtcgtaattatgaacaggatgttgccgttttgaatgactttgtggatattaataaaactactcacgaatattatgtcaactcaaacaagcatacttcagttttgtcgtatataaagaattcagctgtggaagaattaaattcggtcaatttgctgaactttgaaattttcaacaagagtctttcgcgtataaatcagatatcggagcagctgatttcttcttgcgcagttgactatatcgtaatgataactgaagatgaaatttatgtaaaccgtataaatgaggattctccagtggaactgcgccagaagttgggcggcaactattcttcgacagtctcttctttaaatgtgactagttacaaggagcagtattatgttagtgattgtaattatatagagacatctgtagagttgaatccacaggcttataagaatgcaggatgggcattcttggtaacatgtgaattgaatggcaagggtgaaaaggaaaatgtcggggtattgttctgtggtgttggctatcacatcaatccttgctttgaatggtttgtaaacgataatgtggactgggattttgaagtggtcagtctgaatgaagagattccatacatagcagaccttagatttttacgtagatgaaaaggttatgcatccctcttgtttgctctgtttttttcttcctgaccggttgtgttgaaaagagcggatactatgaggaaggagaagataatattatctctttgatttgtgatgtggtatgggtcggtgaaaaggtcgtttatgatacggaagaaacggctcaggatatttatcggttcagaagagatggtacttgtacacgtactattgttgtaacaggtaaggatggtgaggaatcccagagtgaaatctattatcggtgggctttttataaccaaagttccaatacgatttatttcggtgaagatcattattgggatattgaagaactcacaaccgcgaagtttgcagtttatgatcgatggggagaatatggaagtttggatatgtctcgggaatatagggaatttactcctttgaaataatatatatagctaaaattatggcggaaagatatgcacggtgttttcttgtatatttttccgcttgttttttataaagctttcgtcagctccattgtgtgagtatggtctgcatatcttttgatttctttagtgatatattttagataatacccgattaaaacttatgaaatgaaattttatatgataaaaaagtaacgttttgtttggatgtaacgaaataatccatacctttgcaccgtcaaactataaaagagacaagaaatgaaccagatgtttatacatattctactatgcggtattattattctactatcaaaggttagtggaagtgagtgctgcgcgtaaatgtgtataaatgaaaatatacgaaagcctttctcacttccaagtgtgaaaggctttttttaatgctaataattatataatatacattgaatatggacaataggttatttatttttgataccactcttagagatggtgaacaggttccgggatgccagttgaatacagtagagaagattcaggtagcaaaggcattggaagcgctgggagtagacgtgattgaagccggattccccatttcgagcccgggagattttaattcagtgattgagatttcaaaagcggtgacttggcctactatctgtgctttgacacgtgcagttcaaaaagatattgatgttgctgtagatgcactgaaatttgctaaacataaacgtattcataccggtatcggtacttctgattcgcacattaaatataaattcaattcgaatcgtgaggagattatcgaacgtgcggtagctgccgtgaaatacgcccgccgttttgtggacgatgtagagttttatgcagaagacgcaggccgtacggataatgaatatctggcacgtgtggtggaagccgttatcaaagcgggagctaccgtagtgaatattcctgatacaacggggtattgcttgccttcagaatatggtgctaaaataaaatacctgatcgaccatgtagacggcatcgataatgccatactttctactcactgtcacaacgacttgggtatggctactgccaatacgatagccggtgttttgaacggcgcgcgtcaggtggaagttaccatcaacggtatcggcgaacgtgcaggaaatactgccctcgaagaaatcgccatgattatcaagagtcaccacgaaatagatattcagaccaatatcaatacacagaagatttacccgaccagccgcatggtatccagcctgatgaatatgcctgtacagccgaataaagcgatcgttggacgtaatgctttcgcacattcttcaggtatccatcaggacggtgtgttgaagaatgtacagacgtatgagattattgatccgcatgatgtgggtattgatgataactctatcgtattgacagcccgtagcggacgtgccgcattgaaaaatcgtctttctattttgggagttgatctggagcaggaaaagttggataaggtatatgatgagttcttgaagttggctgataagaaaaaagatattaatgatgacgatattttagtattggcaggcgcagaccgtagccagaatcatcgcatcaaactggattatttgcaagtgacgagtggtgtcggtgttcgttcggtagctagtttgggattgaacattgccggtgagaagtttgaggcttgtgccagcggtaacggtccggtagatgcagctatcaaagcattgaagaagattgtagaacgccacatgactttgaaagagtttactattcaggctatcagcaagggaagtgatgatgtaggtaaagtacacatgcaggtagaatacgataaccagatttattatggttttggagctaatacagatattattgccgcttccgtagaagcttatattgactgtattaacaaattcaaatcataaaaaagagactgacagtcgtatcggcattgtagagattgactaaaatagtaattagtaaaatagtaaataaacagatgaatacattatttgataagatatgggatgcccacgtggtgactactgtggaagatggtcctacacagctttatattgatcgcttatattgtcacgaagtgactagtccgcaagcttttgccggattgcgtgaacgtggaatcggagtgttgcgtccggaaaaggtattttgtatgcccgaccataacacaccgacacacgatcaggataaggagattgaagatccgatttctaaaacgcaggtcgacacattgactaagaatgcgaaggattttggtttgacacactacggtatgatgcatccgaagaatggaattatccatgtggtaggtcccgaacgtggtttgactttgccgggaatgacgattgtctgcggtgactctcacacttctactcatggtgcgatgggagcaatcgctttcggtatcggaacaagtgaagtggaaatggtattggcttcgcaatgtattcttcagtcaagaccgaaaacaatgcgtatcaccgtagacggcgaactgggcaaaggggtgactgcaaaagatgtagctctgtatatgatgtccaagatgactaccagcggtgctaccggttacttcgtagaatatgcaggttcggctatccgcaatctgacaatggagggacgtcttaccctctgtaacctttctatcgaaatgggtgcacgtggtggtatggttgctccggacgaagtgacttttgaatatatcaagggacgtgaaagtgctccgcaaggtgaagcatgggacaaggctttggcatattggaagacattgaagagtgatgacgatgccgtattcgacaaggaagtccgttttgaagctgctgatattgagccgatgattacttacggaacgaatccgggtatgggtatgggcatcacacaacacattcctacgatggaaggaatgagcgaagctgcacaggtttcattcaagaaatcaatggactacatgggattccaaccgggagaatctttgttgggcaaaaagattgattatgtattcctcggtgcttgtacaaacggtcgtatcgaagatttccgtgcatttgcttccatcgtgaaaggtcgcaagaaagcggaaaatgtaattgcatggctggttccgggttcatggatggtagacgcacagatccgtaaggaaggaatcgacaagattttgacggaagccggatttgctattcgtcagccgggatgttctgcttgtctggcaatgaacgatgataagattcctgccgggaaatattcggtatctaccagcaaccgtaacttcgaaggacgtcagggacctggtgcacgcaccttgttagctagtcctctggtggctgctgctgctgcggtgacaggtgtgattaccgatccgagagaactgatgtaatttcaatcgtaaatagtaaatcgttaaatcgtaaataaaaagatggctaagacaaaatttaatataatcacaagtacttgtgtacctcttcctttagaaaacgtagataccgaccagattattccggcacgtttcttgaaagcaaccactcgtgaagagaaattcttcggtgataacctttttcgtgactggcgttacaatgcagacggttctttgaataaggattttgtgttgaacaaccctacttacagcggacagatattggtggcaggtaagaacttcggttcgggttccagccgtgaacacgcagcctgggcaattgccggctatggtttccgtgtggtggtatccagtttttttgccgatattcataagaataatgagttgaacaactttgtgcttccggtggttgtaaccgaggagtttctgcaagaattgttcgattcaatagaagcagacccgaagatggaagtggaagtgaatcttcccgaacagaccatcactaacaaggcgacaggtaaaagtgaacattttgaaatcaatgcttacaagaaactttgtttgatgaacggattggatgatatcgatttcttgttaagcaataaagataaaatagaagaatgggaaaagaaggcgtgaaaatagaaatcatggacacaacgctccgtgatggtgaacaaaccagcggagtatctttcgtgcctcatgagaaactaatgatcgcccgtttgctgttagaagatttgaaggtagaccgggtggaggttgcttcggcgcgtgtgtcggacggtgagtttgaagccgtgaagatgatttgcgactgggcggcccgtcgcaatctgctccataaagtggaagtgctcggctttgttgacgggcatacttctgtcgattggattcagcgtaccggttgccgtgtgattaatcttctttgcaaaggttcactgaagcattgtacgcaacaactgaaaaagacaccggaagaacatctggcagatatcattaatgtggtgcattatgccgacgaacaggatataaccgtcaatgtttatctggaagattggagtaacggtatcaaagattctcccgaatatgtattccagttgatggatggattgcaagagacgagtgtcaagcgttatatgttgcctgacacgttgggtatcttgaatcccttgcaagtgatagagtatatgcggaagatgaagaaacgttatccgaatactcatcttgatttccatgcgcacaatgactatgatttggcagtgagcaacgttcttgcagccgtattaagcggtgtaaaaggactgcataccaccataaacggactgggcgaacgagcaggaaatgctcccctcgcaagtgtgcaagccatcctgaaagatcatttcaatgcggcgaccaatatcgacgagagccgtttgaatgatgtcagccgggtagtggagtcttattcgggtattatgatacctgccaacaaaccgattgtaggtgagaatgtctttacgcaagtggcaggtgtgcatgccgacggcgataacaaaaataatctttactgtaatgatttgcttcccgagcgctttggtcgtaaacgtgaatatgcgttgggcaagacaagtggcaaagccaatatccgcaaaaatctcgaagacctcggactggagctggatgaagatgctatgcgcaaggtgacggagcgtatcatcgaactgggcgacaagaaagaattggtgacacaggaagatttgccgtacatcgtttctgatgtgttgaagcatggagcgattggtgagaaggtcaaactgaagagctattttgtgaatctggctcatggattgaaaccgatggctacgttgaagatagaaatcaacggaaaagagtacgaagagagttcaggcggtgacggccagtatgatgcttttgttcgtgcattgcgtaagatatataaggtgacattgggacgcaaattcccgatgctgaccaattatgcggtgacaatccctcccggtgggcgtacggatgcatttgtgcagacagtaatcacatggagttatgacgagcaggtgttccgtacccgcggacttgatgccgatcagacggaagctgccatcaaagctactatgaagatgttgaacctcatcgaagatgaatacgagaaaagcaagtgagaggtaacttgcccaaagaatgttttttataagaatatataaatagaagaataaacgattatggattttaaaattgctgtattagcaggcgacggcatcggaccggagatctctgtgcaaggtgtagatgtgatgagtgccgtttgcgagaagtttggccacaaagtaagttacgaatatgcaatctgtggagctgatgcgattgataaagtaggcgatccgtttccggaagcaacctatcagatttgtaaagatgcagatgctgttttattctctgccgtaggcgatccgaaatttgataacgaccctactgctaaggtacgtccggaacaaggtttgttggcgatgcgtaagaaactgggactttttgccaatatccgtccggtgcagacattcaaatgcctgattcacaaatctccgttgcgtgcggaactggtagagaacgcagattttatctgtatccgtgagttgaccggaggtatgtatttcggtgaaaagtatcaggataatgacaaggcgtatgataccaactattatactcgcccggaaatcgaacgtatcttgaaagtggcttttgaatatgcgatgaagcgcagaaaacacctgacggtggtagataaggcaaacgtgttggcttcttcccgtctgtggcgtcagattgcgcaggaaatggctccgaactatccggaagtgacaacagattatatgtttgtggacaatgctgcaatgaagatgattcaggaacctgctttcttcgatgtgatggtaacggaaaacactttcggtgatattctgactgacgaaggttctgtaatcagtggttctatgggcttgcttccttctgcttccacaggtgagagcactccggtgtttgaaccgattcacggttcatggccgcaggctaaaggattgaatattgctaatccgttggcacaaattctttccgtagctatgttgtttgagtatttcgattgcaaagaagagggtgcgctgattcgtaaagcagtagacgcttctttggatgagaatgtacgtacaccggaaatccaggtggctgacggtgctaaatacggaacgaaagaagtaggacagtggattgttgattatatcaagaaagcttgatgaatccggatgaaaagtaaaagcctggcatcggaaacggtgtcagacttttactttccagtttgaaatagtgtcgttgtgttctaccagcttttaatagtggaatagataatgattccgagtacggtcagtaatcctacataaatagtgactgaccattgtttgagttcttttctcttcatacgggtagaaggttccagatagatggttgctttatgggcaatggtagcgaacagccatccgccgaatccgccgataattcctccgacgagcaaatcacccggataatgtacccctagatatacgcgtgtgtaacaattgaagagggcccatacgataatgaaaatgcttagccagcgtttgcggaacatgaagaccacgtacatggcaagaccgaatgaattggctgcatgacacgacgggaaaccgtagctcccgccacgataattgttgacgatatataccatatctacaatgggactttccggattggaagggcgcaggcgtgccacgaccggacggatgatactgctgcacatctggtcggcgaaggtgatgataagtgcaatagtggctacataacacagagcggctttccaatggaagttctttagtaatatgtataggatggtggcgtacatcggtacccaaattatttttcctgtaaaggaagtcatgaaatagtcccaaaagggagagtggataccattgaaatataggaaaacatttgtatctatctccgaaagatattggatgatgtcagtatgtaccatctggttctgtttttatatttttactgtgattattcagttgttctccggctttatcgtttggctaggtcatcgtagagcttttggaggaaagcttttcccttctccagattggcacctttctctggaccttcgtcaagttgtacggtatttgcatccaggttatataccaactggttttcgggagtaaccatgccgaagaagttcggtcgggtaaaatatccgaaatgcggagatgacgggttcagtatgtttttgctgaatgtaaagtcatcgtgtggcagccccagctgtgcgagcaaggtggcggcaatgtcaatttgtgaagcatacgtatctattacacgaggctctttgattgctccgccaagcaagattaacgggatggtctgcccgtccaacggattttctatcggatacggataagctccctgatgatcgggaacaagtacaaatagggtgtttttccaaagctgcgtctccttatattgttctacgaaatctcccacgcaactgtccgcataggcaaaagcattgagtattttatcgtccagtctgtggaacggaacttcaaaaggttcatgactgcttgaggtttgcacgagtttaagaaaaggttcttgctgtttttcctccttgatgtctttcatcagacgttggaataatacatggtcctgcgctccccattttccggtacgttcggacaatggaaaatccttatcgcatacaattctctcaatgccggaggataccagataagaacgcatattcgtaaagtcggcgtcccctccgtaataatattccagactgtatcccgcatttctcaaacttcgtggaatagaaggaagtttgtccgtcttttcgggatatttcataatgctggtgcttggctgtccgggataaccactgatgatggaagccagcccacgatcggtacggaagctgctagcgtaaaaattgctgaataatatgccttctttggcgaatttatccatattgacagctacgttcggatgtccgccgaaagtttccatcaggtgtgtggaaaaactttcgagaataataaagataatattcgggcgttgtgtatttaataattggggaatactgtcggcagttacggcaggtttgtctaccatttccgcaaacaattcgtcggccttttgagggtccatgaaccgatattgtttctcaaaattattctgatgggtagcagaatacatgaaactgaatgccggattgatggcggcatgattcattcgctgatcctggctgtaatagactttactcagattcatggtcgatacggtgaacccgccacgaatggggataaaaagtgcggcggtgagcaataatagcgcgaatgaaacattttgtcggcgatagggtatctttaaaggttttctttcacggatcagtacgatataaaagatagaatataaaacagccgcatagaccaacattgctaatattcccaataaaacgaaccagaaactgacgcttgcgatagcatctttgggtgaggagaagaaatagaaaatgggggtggcgtcaagacggaatccccagaaaccgtatagcccgagatcgacaataaagatacatgccataacaaatgctatcaatccgaaatagacttgccggatgcggcggagtatagacgaatccgtccaggcggaagcgataagtatcaggccgggaatggcggtgaggtaacctgcgagtgataaatccaaaggtaagccgtgccacatgacactaaaataatcaccgaaagaaacatcggcgtataaatcatggtagtagaccatgaagaccggcttttgaagaacaaacaagaggacaaataaaaagtatgtcgtgaaaaattggataattctctttttcataatgtgtaaacttaaaataattgaacggatacaaagttagtatacttttcgttatctttctcatgatgtaatataaaacatctctttttttccatatctttgtcgtgtgtgtgacaaaaattaagtaatgaaatggctaagattgcgaagaaactaacagatttagtggggaatactcctctgatggagctttctggttattgtggtaagtatggtctggaacaaaatattattgccaaactggaggcctttaatccggcgggaagtgtgaaagacagggtggctctttcgatgattgaagatgcggaggcacgtggggtattgaagcccggcgcaacgataatcgaaccgacaagcggaaatacaggtgtcggactggcaatggtcgctaccatcaaaggatatcacctgatattgacaatgcctgagacgatgagtctggaacggcgtaacctgttgaaagcactcggtgcggaaatcgttctgacagacggcttgggcggaatggcggcttccattgcaaaggctgaggaattgcgagacagtattcccggttcggtgattctgcaacaatttgagaatccagccaatgcggcggcgcatgagcgtacgacaggagaagaaatctggcgggatacagatggtgaagtagacgtttttgttgccggagtcggcaccggaggaacggtttgcggtgtagcccgtgctttaaagaaacataatcccgatatttatatcgtagcggtagaaccggctgcgtctcctgtattggaaggtggacaggcggctccacaccgtattcagggaatcggagccaattttattcctaaactttatgatgcttctatgatagacgaagttatcggtgtgcctgatgatgaagcgattcgtgcaggacgtgagctatcggcaacggaaggcttgttgaccggaatttcttcgggagcagctgtgtatgcagcccgtcaactagcacagcgtccggaatttaaaaacaaaaagatagtggcgttgttacctgatacgggagagcgttatttgtcaacggaattgtttgcatttgacgcatatccgttggactgattttgatttataaatactaaaaagacttgaaccatggtaagaacgattattgctttatttttctgtttcccggttgccttgtatgcgcaaacttatcagcaattgtccgaaagggctattgactgtatcgaaaaagacagtcttccacaagcggaagaacttttgcttcgtgctttgaaactggaaccgaaaaatgcgaagaatgcgttgctcttttccaatctgggattggtacaacgtcgtttgggagagtttgataaggcactcgaatcttattcttttgccttgaactttgctccattggcagttcctattttgttggaccgtgccgccatctatatggaaatgggaaagacagatcgcgcttatactgattattgccaggtgcttgacggggataagcaaaataaggaagccttattgatgcgtgcgtatatttatgtactccgcagggattatccggctgcccgtattgattataatcgtttattggaacttgacccgcagagttatagcggtcggctgggattggctacgctggaacagaaagaaggaaagttccgtgaagctcttgccattctgaataagatgattgtggaatatcctgaggatgcgacactgtatatagcccgtgccgatgtggagcgtgacatgaaacatgaagatttggcgctggttgatttggaggaagcgatccggttggatgcctcgtcggctgatgcttatttgttgcgtggaaatatctatctggtacagaaaaaaaaggcattggcaaaatcggactttgagaaagccatttcgctgggagtacctcctgccgatttacacgagcagttgaaacaatgtagataaccatttcaatacttattccctgtcatcgtgtgattggcggtaactgtgctttgaccggttatgcgggtaggctgccgacaaaaaaggctttactggatttggagtcggatgtcaggtgaactgccggattaggttgacgaaatctttaccatactttttcttcttatattctccgataccgctgatagatccgaaatcttcaatggtggtaggtcgtgaaatgctgagcagatgtaatactttgtccgacaatacaatataggcgggcagaccttcctggtcagctaattgttttcttaatccgcgcagtgcttcgaataaatcttcgctttcgccgcctgccaggccgaaaggaagttctttggttaccactactttcttctttttcccttttcgtgtagcggtctcttcgtgacggataactgccaatgtggcttttgctctcccaaaaagaatgtcacttccgctgggcgtgattttcagatggttgttctcgttataagctatttcaaaatagccgagttgcaacatctggagaaggtaatcttgccaatcgcgagggggaatatcacgcccgacaccgaatgtcttgagttcttggtaccctttcgctgtcacctctgccgaatagcttccccgcagaatgtcgatcagaagccctgtcccgatctgttgttccgcacgtgcaatggcgcttagtgctttttgtacaatgactgtcccatcaaaacgctgggggggattcttgcagacatcacaatttccgcagtcctctgtggctgtctctccgaaatagctcaataagatgcgtctccggcagatgtcagcttccgcatattgttgcattcgttgaagtttctcgagattgatcttttgttggctactttccgatgcaaatttggtcagtagtatcaggtcacctaatgaatagaataatacagtatcgctgggcaggccatcccgtccggcacgtccaatttcctgataaaagctttctatactttggggcagattatagtgaatcacccagcgtacatttgatttgtcgattcccataccgaaagcgatggtggcacacactacctgaatgcggtcgttgatgaaatcattttgtgtctcgtcacgttgctgtgcggataaaccggcatgatagaccccacaacggataccttgctttagcagcgtttgggctacagtttctgtcttgttgcggctcatgcagtagataattccgctttcttttccatggcgttggatgaattctatgatggctttatttttttctttcgtctgaaatccccgtttgactgttaggctgatgttggggcggtcgaaagaagaaataaacgtacgcggtcggataagatgtagctgacggatgatatcttcgcgggtgattttatccgcagtggcagttaaagcgatgatgggcacttgtgggaattgttgatggaggactcccatttgtgtatactccggacgaaaatcgtgtccccattgagagatacaatgagcttcgtctatggcaaatagagaaatgttcatatcccgtagcaggtagtctttttccgccaacaatttttcaggagaaatataaagcagtttcagcttccccgcaacgcaggaacgccgtaaattggcattttccgtttcgtcattactgctattcagagctccggcggcaatgccgtttgcctgtaacgcttccacctgatctttcatgagtgagataagcggagaaaccacgatagcagtaccttcgctgagcaaagcgggcaattgataacagatggattttcctccacctgtgggcattagaaccagtgcatcctgtttatctagaatatgccggatgatttcttcttgtagcggacggaaactgtcgtatccgaaatatgtttttagagtatctctcattggacgttaatttaaacttgctgcaaaggtacgtttttattcgtcaattatgataatgagtgatttctgtttccgatatgaaatataaaaaggttaaagtttcttattattcgagcttaatccctctttttcaaggcttttgattgtttattcagaaaaaaacgcacaaaataattgtgtgtttaaaaaaaaagtaagacatttgtaacatgtaacgttgcaagtatgcaacctactaacaaatgaacaaaccctaaccagttaattcaatgagtgatttagagaacaaaacatcggaagaaactccgaaaaaacgcccttacaatttgagggagaagaaagaaaagaaggctgcatataggtcgttaatcagaccggaattggcagatgagttgtatgacaagatcttgaatatcatagtcgtacagaaaaagtacaaggatcctgattattcagcaaaagacttggcgaaagaattgaagacgaatactcgttacctttctgcagtagtgaactcgcgtttcggtatgaattattcttgtttgttgaatgaatacagagtgaaagatgctttgcatttattgactgacaaacgttatgctgacaagaatgtggaagaaattagtgccatggttggtttcgcaaatcgtcaatctttttatgccgcattttacaagaatataggtgagactcctaacggataccgcaagaaacatttggaaagcaaaaagtaatagcgtgttccggaattagccaaaaggaattacctctaaatgaaaatgtttggagataattccttttctcattttaattgatcaacactagcattatgaagaaacatcttatttcaatgactattgccgccacgcttttgacgtcgtgcggaggaagtaaaacaacaactgctgatgcagaaaaatttgattacacagtggaacaatttgctgatttacagattttgcgttacaaggttcccggattcgaggaactgacgctgaaacagaaagaactgatttattacctgacacaggctgctttggaaggaagggatattctgttcgaccagaatggaaaatacaatttgagaatccgtcggatgctcgaagcggtatatacgaattatcagggggataagacaacttctgactttaagaacatggagatttacttgaaaagagtatggttctccaatggtattcaccatcattatggctcggagaaatttgtaccgaatttctcacaggactttttgaaacaagctgtgcttgccctcgacgccaagcagcttccgcttgcagaggggcagactgccgaacagctttgtgatgagttattccccgtgatctttgatccggctattatgccgaaacgggtgaatcaggcggatggtgaggatcttgtgctgacttcggcttgtaactattacgatggggtgacgcaacaggaagcggaggctttctacggagcgatgaaggatccgaaagatgagactcccatttcttatggcttgaatagccgtctggtaaaagagaatggaaagttgcaggagaaagtatggaaagtcggcgggctttatacacaggctattgagaagattgtgtattggctgaagaaagcggaagcggtggcagagaatgatgcacagaaagctgtgattgcccaactgattcagttctatgagaccggtagcctgaaagattttgatgaatatgctattctttgggtgaaagaccttgactcgcgaattgattttgtgaatggatttacagaaagttatggagatccgctaggcatgaaagcgagctgggaatctttggtcaacttcaaagacctggaagctactcgccgtacggaaataatcagcagcaatgctcaatggttcgaggatcattctccggtggacaagtctttcaagaaagatgaagtgaagggtgtgtcggctaaggtgattaccgccgctatccttgccggtgatctctatccgtcaactgctatcggtatcaatcttccgaatgctaactggattcgtgcgcatcacggttctaaatcggtgactatcggtaacattacggacgcttacaataaggcggctcatggaaacgggtttaatgaggaattcgtttatagcgatacggaaagacagttgatcgacgcttattccgatctgacggacgaacttcacacggatttgcatgagtgtctgggacatggttccgggaagttgcttccgggagtagatcctgatgcgttgaaggcttacggctctacgattgaggaagcccgtgccgacttgttcggattgtactatgtggctgattcgaaattggtggaactgaaacttctttcctctccggaagcttataaagctcaatattacacgtatctgatgaatggtctgatgactcagttggtacgtatcgaaccgggaaacaatgtggaggaagctcacatgcgtaaccgtcagttaatagcccgttgggtctatgagaaaggagctgccgataaagtcgtggaattggtgaagaaggatggaaagacgtatgtggtcatcaacgattatccgaaggtacgcgaacttttcggtgagttattggctgagatccaacgtatcaagtcgaccggtgattttgaaggtgcccgttcattggtagagaattatgcggtgaaagtagatccgactctgcatgctgagatactggaacgctataagaagttgaatctggctccttacaaaggttttgtgaatcctaaatatgaactggtgacggatgaaaacggtaacattacggatgtcaccgtatcatacgacgaaggttatgcagaacagatgttgcgttacagcaccgaaaactctccgttgccttcggtaaacaactaatctgaaatggatattaaagaacaactgaaagatatcaagacacagctccgtctctcaatgaacggggctgtgtcccaaagtatgcgtgaaaaggggttggtatacaaattgaattttggtgtcgaactgccccgtatcaaaatgatcgcagggaattacgagaagaatcacgacttggcgcaggctttgtggaaagaggatatccgcgaatgtaaaatattggccggactgttgcagccgattgatactttttatcctgagatagccgatatttgggtagaggatatccggaatatagagattgcggaactgacgtgtatgaatctttttcagaatctgccgtatgcccctgccaagtctttccactggatagccgatgaacgggaatatatacagacttgtgggttcctgactgctgcccggcttctgatgaaaaagggagatatgactgaacgggctgccggtgagttgcttgaccaggctatttgcgctgttcactccgaaagttatcatgtacgcaatgctgctttgctggtgattcgtaaatatatgcagcacaacgaagagaatgctttccgggtatgtcggttggtagaaggaatggccgattccaatatggaaggagagcaaatgctttataatatggtaaaggcggagatggaataataagcctgtgtacttttaattggtatattggcataggagcaaattgataatttattaaaatccttttgcgttccgcaaaaaaggcttaactttgttcgcgctaattttggctgatgatggaaactcaaaacgtgaaagatacagtaaggcagatattcactgaatatctcactgcgaacgggcatcgtaagactcctgaacgctacgccatactcgatacaatttattctatcgacggtcatttcgatatcgacatgctttattcacgaatgatggatcaggagaatttccgggtgagtcgggctactctttacaataccattattcttcttatcaatgcacggctggtcattaagcatcagttcggtacttcttcccaatacgaaaaatcatacaatcgtgaaacgcatcatcaccagatatgtacgcaatgcggtaaagtgactgagtttcagaatgaggaattgcagcatgccattgaaaatacgaaattaagccgcttccagctttcgcattattccttatatatatatgggatatgcagcaagtgcgacagagccaacaaacggaaaaaagtcaataacaacaataaaaaagaaagatgaaagtagatgttctattaggattacaatggggcgacgaaggtaaaggaaaagtagtcgacgttttaacacctaagtacgatgtggttgctcgttttcagggcggcccgaatgccggtcacacacttgagtttgaaggacagaagtatgtacttcgctctattccttccggtatttttcagggaaataaggtaaacatcatcggcaatggtgtggtacttgacccggcgctgttcaaggcagaggctgaggctcttgaagcatccggtcatccgttgaaagaacgtttgcatatttcaaagaaggctcacttgattcttccgacacatcgtatccttgacgctgcctatgaagctgccaaaggggatgccaaagtaggaactaccggtaagggtattggtcctacatatacagataaagttagtcgtaacggtgttcgtgttggagatatccttcataatttcgaacagaaatatgccgcagcgaaagcccgtcacgaacagattctgaaaagtctgaattatgaatatgacttgacggagctggaaaaggcttggctggaaggtattgaatatctgaaacaattccatttcgtagatagtgaacatgaaataaacaatttgttgaaggatggtaagagcgtactttgtgaaggtgcccaaggtactatgcttgacattgacttcggttcatatccgttcgtaacttcttctaatacggtttgtgcaggtgcttgtacaggcttgggcgtagctcctaaccgtatcggggaggtatatggtatcttcaaagcatattgtacacgtgtaggtgcaggtccgttcccttcggagttgtttgatgagacaggcgacaaaattggcgcattgggacatgagtttggtgctgtgaccggccgtaagcgtcgttgcggatggattgacttggtagcattgaaatattctgtaatggtaaacggagttactaagttgattatgatgaagagcgatgtgctcgatactttcgatgccatcaaggcttgtgtagcttacaaggtaaatggtgaggaaatcgactatttcccgtacgatatcacagaaggcgtggaacctgtatatgcagaacttcccggttggaagacagatatgactaagatgcagagcgaagatgaattcccggaagaattcaatgcttatctgactttcctggaggagcagttgggggtacaaatcaagattgtatctgtaggaccggacagagcacaaactatcgaacgctatactgaagaataataattgactaatttttagctaattcttcataaaagcaaggggaaactattctgacattgatagtttccccttatttttggcaaacaatttgtatatagagatatagagtaataattaaaatgaaatgaatatgtcttattgggtattatttataggaatagccgtagtaagttggctggtacaaatgaatttgcagagcaaattcaaaaagtattctaagattcctacaggaaatggaatgacaggacgcgacgtagctatcaagatgttgcatgacaatggaatttatgatgtacaggtgacgcatacgccgggtcagttgaccgatcactataatccgactaacaaaacggtgaatctgagtgaaggagtgtacgaaagtaatagtataatggcggctgccgtagcggctcatgaatgtggtcatgccgtgcagcatgcgcgtatgtatgctcctttgaagatgcgtagtgcgttggttccggtagttaattttgcctcttccattatgacatgggtattgctgggtggtatcttgttggtgaacacatttccgcagttattgctggcaggtattattttgtttgccatgactacattgttcagttttatcacgttgccagtggaaatcaatgcaagtaaacgtgcattggtatggttgagttcatccggcattactaactcgtacaatcatgcacaagctgaagatgctcttcgttctgctgcttatacctatgtagttgctgcattgagttcattggctacgttggtttactatatcatgattttcatgggtagaagagactaagtctttccgaagactatggaggattttttcatatatatgtaagcattgctcggaaatttgcagtaaatttgcgcaattaaaattataaacagcaatatcatggcagcaaaaccaagtattcctaaaggaactcgtgacttctcgccggtagaaatggcgaagcgtaattatatattcaatacaattcgtgacgtataccatctgtatggttttcagcagatagaaactcctgcgatggagatgctttctacgttgatgggaaagtacggtgacgaaggtgataaactcctttttaagattcagaattcgggtgattacttctcaggaatcacagacgaagaattattgggccgtaatgccgctaagctggcaagtaagttctgtgagaaaggattgcgttatgacttgacagtaccttttgcacgttatgtagtgatgcaccgtgacgaaatcactttccctttcaagcgttatcagatacagccggtatggcgtgccgaccgtccgcagaaaggacgttatcgcgagttttatcagtgtgatgcagacgtggtgggaagtgattccttgctgaacgaagtcgaattgatgcagattgtcgatactgtattcagccgtttcaacatccgtgtgtgcattaaaatcaataatcgcaagattctttccggtattgccgagattatcggtgaatcggataagattgtcgatatcactgttgccatagataagttggataaaatcggtttggacaatgtaaatgccgaactgaaagagaaaggtatcagtgatgaggctattgccaagctacaaccgatcattctccttagcggaacgaatgcggaaaagttggcgacgctgaaaaatgtgttggctgccagcgaagtaggattgaaaggggtagaagagagcgaatttattctgaatgctttagagacaatgggattgaagaatgaaatcgaacttgacctgacattagctcgcggactgaattattataccggtgctatttttgaagtaaaagcattggatgtgcagatcggcagtatcacaggtggtggtcgctatgacaacttgaccggtgtattcggcatggcaggagtatcaggtgtcggtatttcctttggtgcagaccgtatctttgatgtgctgaaccaactcgacctttatcctaaagaagctgtgaatggaaccgaacttctgtttattaactttggtgagaaggaagccgcgttctctatgggcattttatcgaaagtacgtgctgcaggtatccgtgcggagattttccccgatgcggctaagatgaagaagcagatgagctatgccaatgcaaagaacattccgtttgtagctatcgtcggtgaaaacgaaatgagtgagggcaaagcgatgttaaagaatatggagacaggagaacagaatcttgtttcggcggaagaattgattgctgctataagataagagatagtaggaatataaaaaaataaggtgtcgttgacttcacaatcagcgacaccttattttttctttccctgtgtactgtttaatattctatttggtcaagtattccgttgaggtaggcgatagccactccataatttgtcatggggatgtgctgctcccgtgcacgttcgatgcggcttagcacatatttgcggttgaacatacatgctccgcaatggataatcaagtcgtaaggcgtgagatcctgagggaaatccgttccgcctacaatgtcgatctgtaacttttcgccaattcgtttgcgtaataggcggggaagtttcactcttcctatatcttcggtaaggggagcatgggtacaagcctccgcaatcaatacgcgtgaatcctccgtcaggctttcaatgacggcagcgctttctacatagtaatgaatgtctcccttataaccggcaaaaagtaccgaaaaagaggtcagtttgctttcttctggtttctgttcataaacagctttgaaaacttgcgagtcggtgatgattagttttggaggacgggcgagagcttgtaatgtctctgtcaacttgtcggtagtgcaactcacaacaaggcatttcttgtctagcaattcacggattgtctgcacttgcggcaggataagtctgcctttgggagcttggatatcctgcggcatgacgagaagaacaagatcattctctgcggtaagctctccggtaatgctttgctgaccgaaatccgaaggcagtttttcaagaattgcctgtcggatttgctcgattcctatctcttcttttgcactgacgagcaatggacgtattttacattctttctcaatgtatgtagctaagctatcactgttctctcttatatctattttattcaataccggaatgacagggatattcttctctttcaatagtgctagcatctctttttcatgagaaaaggtagtatccccacatagcagcaatgcaatatccgttttctcaatagcttttaaagtccggctgacacgcagctctcccagctctccctcatcatcgaaccccggagtatctataaacaaacacggaccaataccttgcatttccatagctttggatacaagatcggtagtcgttcccggagtatctgaaacgagggcggtatcctgtcccgtcaatgcattgacaagagaagatttaccactgttccgtctgccgaaaagggctatatgaagtctgttggcatttggagtatttgtcaggctcataagcgaaaatctcttttaccgttggaaatttcttttaagttacggatagctatttctctgattttgggattgggaattcgttccgtttctttggaaatcagctccaatcctttccgatgggtatcttcggaggcatagtcttccagatactctttcaaggtcatcagagcgttcggcccgcagcaatttgctatctgaccggatttgactaatgacatgaagcggtctcccgtccgtccttcccggtagcaggcagtgcaaaaactaggaatatagcctagttcgagtagccagttgaccacttcgtccaatgtccgtgtatcgctgatatcaaattgagcggagttgttttcgggtaattctgtttcggcataaccgcctacactggtacgtgagccgccactgatttgcgagatacccagttcgagaacttttttacgggattcctgtgattcacgggtggaaataatcattcccgtataaggaacggcaatccgaatcacagccacaatcttgctgaatatttcatctgagatggcattgggaaagtctccggcgtcaatatcatctgcagaacagattcgggggacgctgatggtatgtggtcctacaccgaacttagcttccagatgttcggtatgcattaacaatcctacaaaatcataccgataagtattcagaccgaaaagaactccaatccccacatcatcaatacctccttccattgcacggtccattgcttccgtatggtaagcatagttacttttcggtccggtagggtggagggtttcgtagttttccttgtgataagtttcctgaaatagaatgtaggtaccgatacctgcttctttcagtttacggtaattttctaccgtagtagcagcgatgttgacattcacccggcggatggcaccgttcttatgctgaatgctataaattgtctttatggactccaggatatattctatcggattcagtgatggatgttctccggcttcaagagcaagacgcttgtgtcccatgtcctgtaaggcgatcacttcccggcgaatctcttcctgtgtcagtttcttgcgggcaattgtcttgttcttggcgtgatacgggcaatatgtacaaccgtttacgcaatagttcgacagatagagcggtgcaaacatcacgatgcggttaccatagaatttttgcttgatttctttagcaagatgaaatatgcgttctataaggtcgggctggttgcattccagcaacagggctgcttcgcgatggctcaatcctttacaatgggaggccttttcaatcagctgctcgataagtgcacggttgtctttattgtttttagcgtattccagcgtattcagaatttcttcgtggtggataaactcttctgcttttgatgaatctttttggtatatcatatattttctcttttttcattttcaccacagattacacggattttcacagattaagaatgaaccggaataaatctgtgaaaatccgtgtaatctgtggtgtactgtataaagtcccctctttcggtggaaatctcgtagccgatggcattcagttgtttttgtagggcaatcaagccttcggcagattccgctccgagtgaagctttgtcattatataactcatatttcttccgttcctcgcgcggagagaggttaggcattactacattggcgcctgctaatattccccgttctcttccgtcggaggcaagagtcgctaaagccgttgttgccggaatcaatgcagatggatgcatcaggcggaagatggataataggagaactgtctgtgccactgttccacttgggcattgggcaaaaggggtatcatgatgcggcaggaaaggacctatgccgatcatttccggacggagccgttctataaataagatatcttcgataatatcttccactgtctgtccgggactgccgaccataattccggttcctgtctggtaaccgatgtcttttaaatcttgcagacattgcaaacgccgcttgccggacatctccgccggatgcagttgttggtagtgtgcctcgttgtaagtttcgtggcgtagcagataacggttggcgcctgctttaaaaaaacgttcatacgtattgcgggacttctctccgagtgataatgtaatggcacagtccgggtattcttgccggatgtttgtgactatcctctctatcttatcatccgtcaggacgggatcttctccaccttgcaggacgaaagtacggaaacctgactcatatccctgtttgcaacagtccaatatgctttcctgcgtcagccgataacgctcgatgtttggattacctttacgaatgccgcagtaatagcagttgttccggcagcaattactgatttcaatcagtccacggatataaatcttgtttccaaaatgaaggagactgacttcctgcgcctgtttgttgatgtaacgcagcagctctgcgtcacattcagtcaacagttgccggaactcttccggtcggagtgttctttcccgccgtagcctatcgatccattgtttcatagctctctttgcgtttgagaagctcttgtaccagttggcgacgtcctgaaacaatatcgttatgcgtacttggaccggtgatacatccgccttcgcaagccatcacttcgatgaattgtccggcagcttttcccgtcttggcgcaagcgcgtaacagagcgatattcttcttattgatgtccgatacctgtatcgcgttgattttctccgcttcttctttcaagtaagccttgacagcccccatcacgccgcctgcctgggcaaacccgtgtgcttcgcggacggaagtgtgcagaatggaaaattcctgcatttgttccagttggatatcgaatccatcaagaatagaacctatttcctcaaatgtcagaatgtagtctaccgcttcgtcgcgtcggacttctttacgcttggctatacaggggccgacgaatacgatttttgcgtccgggtgtttttctttggcgatccgtgcggcataatacatgggtgaaccggtggaagatacgtatggcttcattcccggaatatgtttttcgactaactctatgtaggaagggcaacaagaagtggtcatgaatttctgtccctcttccaacttctccaataactcgtgagcttcgttgctggtagtctgcatggcaccttcagcaacctcaatgacatcagcgaatcctatttccttaaatgctccatataccttttctatggttgtgttgaactgcccgagaatggacggtgcaacgatggcaaccagcttttctcctttacggatatgctgcaggacatcgaatgtctgtgaaatctcaaagattgcaccaaatggacaagcgttcaggcacttaccgcaatagatacatttactttcatcgatatgctctatgccatgttcgtctttgctaatcgcttttaccggacaagactcctcacatggcacggggatatacacaatggcatgataaggacaactcttatggcaaataccgcaactgacgcaagtgtcatggtcaatcatcgcctgaccgttctttttgaagcgtatagcgtctttggggcagttcatatagcaactgcgggctacgcatccgcgacaaagattggtaatctcatagttgatttggacacaggaagaacatgcttcgtcaatcacacacatgatattttccttattcggctcggggcggctcaatgccatacgcgcataatcagagaggggagcgacttcatcatgttcatccgtcatatccaatcccatcaaaggaaaagtcttatatctccataccgcccgttccttatgtatgcagcaacgtcccgtcggcttcgatcttcgggggctcagttctacggggagccggtctatcttttctattaactggtcgtttttccagagtcttacaaggtctgccagcaatttgtgccggacaatcataatattattcgtaaatgccatattgtaataaaaataaagagattattagttagccggtgcaaagatacgaacactatttcaatatttaagttttttgcaataaaagaaaataaacaggcgaagtgaggtggttcgctagaaattcctatatttgtcggaagaaaaaatgaaacttcatggaagaaaagaataaagcatggcaaactgtgagtagtaagtacctgtttcgtcgcccttggctaactgtacgttgcgaagatatgttgctcccaaatgggaatcatatccccgaatattatatcttagaatatcccgattgggtgaatacgattgccatcaccaaagaaggtaaatttgtttttgttcgtcagtaccgtcctggaatcggacggacttgttatgaactttgcgccggtgtgtgcgagaaggaagatgtttcgccactggtatccgcccagcgcgaattgtgggaagaaacagggtatggcaatgggaactggcaggaatatatggtagtttcggctaatccgagtactcatactaacttgactcattgttttctcgccacagatgtggaactgatagatcatcaacatttggaagctacggaagatatttctgtgcatttgttcacattggaagaggtgaggacgttgcttgagaataacgaaattatgcagtcgctgaatgccgcccctctttggaaatacatggcaagtctataatttaaaatcattatattatgaaaacaacattattaagtgtcctttgtctgttcatttcgggatgggggagtatgcagaccgcattagcgcagaatttacaggaaatggagaaaagtttgtcggccatcaatgaagaactgaatcagaaaacaaaagaatatagttggcaacttgtgagtgcttacgcagactattgtgaagcgaataataagtatatcagttggaatgatgtgccttacctgcaagagattgttgaatataaccgtcctgcttcattggaaaattaccggcttgagcataaagtctgtaaagatgcgctggataagttcttaaatacatataaagaatatagggagcttaaaaagagacaatcggaggctgtatctaaggaagagaaagatgcggtgtcggcagctttttctgctttttggaagaagttgagaagtgaagacaatgcttacaaagaattatattatgcggaacggaagaccgtttgtaaatatagatcggaagctttgcgatatatgattgaacaatataaaaaggataataaggcagtgtccacttctatgataaaatactcagaccgttcttatctgctacagaaaggttcagctttggaactgttggataaagaagtgaacgcattggaaagtgttcaaagggaacttgtacggaaaattacgagagcaaagtatggcttgactgaagctaaagaagagtaagaaaagactttctatctgtctgatttaccggaattaaggtatgatgtccgtgtgtcgtacaaatgtgatatgcctttcaccttttcgctataacgccttattcatggatgttagcaggtgaagggcatatatttcacccactttcctttttttaagctatctatgtataccgataattggtctgatggcgaccggatattgtagatgaacttcttttctataggatctaaacttcctttctataagaactaatttctttttggttatagataaactataaacgaaggctttgattataaaaacgaagcctttgtttttataaacgcaatctttgtttttataaacgcaacttgcgtttatagattgtgcctagtgcaaaagaattttatattcggaagaagagaagtttatctataatagaaaagaagtttagtgcctatagaaagtaagcttgttattaatgaaccggaggtgtaaatgcgggtgaagatgtcgctcttcacccgttaacactgatgaatgaggagttacagtgaaaaggtgaaggctattaatatatcaagctcatgttataataaggcataatatgaatcctgtgcgaaaactttcgcacgggattcatttgtttttgccataacgaggtaggcagacagccattttgtcagttcaatttctgacaaagaatcactaaactgctttggcacacttttcgcaatgtttttagcgttccgcctgaaaatgacgggtaacatctaaatattaaatgtataactaaaatataacaagtaactatgaacattaaaccattagcagacagagtgcttatcctccctgcacctgcagaagaaaaaacaattggtggtatcattatccctgatacagcaaaagaaaaacctttgaagggtgaagttgtggcagtaggtcacggtacgaaagacgaagaaatggtattgaaagtaggcgatacggttctttatggtaaatatgccggaacagaacttgacgttgaaggtactaaatatcttatcatgcgtcagagcgacgttctcgctgttttgggttaattaataatagtagatagtaaaattttaaatagtaaataaagatatggcaaaagaaatattattcaatatcgatgcccgcgaccaattgaaaaaaggtgtcgatgctttggcgaatgcagtaaaagtaactcttggtccgaaaggacgtaatgttatcattgagaagaaattcggtgctccgcacatcacaaaagacggtgtgacagtagctaaagaaatcgaattggctgacgcttaccagaatactggtgcacagttggtaaaagaggtcgcttctaagacaggtgacgatgcgggtgacggtacaactactgcaactgttcttgctcaggctatcgtagctgaaggtttgaagaacgtaacagcaggtgccagcccgatggatatcaaacgcggtatcgacaaggctgttgccaaagtagtggaatcaatcaagaaccaagctgaaacagtaggtgacaactacgataagatcgagcaagtggctactgtatctgcaaacaatgatccggtgatcggtaaattgattgctgacgctatgcgtaaagtttctaaagacggtgttatcactatcgaagaagctaagggtactgatactaccatcggcgtagtggaaggtatgcagttcgaccgtggttatttgtcggcttatttcgtaacaaatacggaaaagatggaatgtgagatggagaaaccttacatcctgatctacgacaagaagatttctaacttgaaagatttcttgcctatccttgaaccagctgtacagacaggtcgtcctttgttggtaattgcagaagatgtagatagcgaagcattgactacattagtagtgaaccgtctgcgttctcaattgaagatttgtgcagtgaaggctccgggcttcggtgatcgtcgtaaagaaatgcttgaagatattgctatcctgacaggtggtgttgttatcagtgaagaaaaaggtttgaaactggaacaggctaccattgaaatgttgggtactgccgacaaggttactgtttctaaagacaatacaacaatcgtaaacggtgcaggtgacaaagccaacatcaaagaacgttgcgaacagatcaaagctcagattgcttcaactaagtctgactatgaccgcgagaaattgcaggaacgtctggctaaattgtcaggtggtgtagctgttctctatgtaggtgctgcttctgaagtggaaatgaaagaaaagaaagaccgtgtagatgacgcattgcgtgcaacccgtgctgctatcgaagaaggtattattccgggtggtggcgtagcttacatccgtgccatcgaatctttggaaggtctgacgggtgacaatgctgatgagacaaccggtatcggtatcatcaaacgcgccatcgaggaaccgcttcgtgagattgtagctaatgccggtaaagaaggtgctgtagttgttcagaaagtacgtgaaggaaagggtgacttcggttacaatgctcgtacggatgtgtacgaaaacttgcacgctgccggtgtggtagatcctgctaaggttgctcgtgtagctttggaaaatgcagcttctatcgctggtatgttcctgactactgaatgtgtaatcgtagaaaagaaggaagataagccagaaatgccgatgggtgctcccggaatgggaggcatgggtggaatgatgtaattccggctttcgtagaatgaatataggagtcgctttcggtttaccgaaagcgacttttttgttataaactgttctgaaacttaaaagaatctctttttgtttcttatctttgcatatcatctatattatagaatatatctgtatggataaaatagtagaactgtcggttgagaattttaaggctgtaaagaaggcagatatcgctttgaatggaataacggttgtatccggtattaatggttgtgtgtagagcttgtcgggataaaggcaaaaagtcgggcttttccatgtgtttttactttttgataattgcaaacataagaaaataaaatgatttccacttcaagatagactataaaatagacaataaaaaggtatgacttaccttattgcgattagcaataatagtaagtcatactttgggagaggtattgaagatcttaaaaagagaataacttaaaatacctcccgtatatgcttaaagttagaattgatggtatcaattacttcttgtgagcggccgttgattaacaacttgtacatcgactgtgcaaaacccaccatttgtccgaattcaattttcggaggcatggccagtgcattcggatcagtcatgatattgacaagtaccggaccatccagttcgaatgcattaagtaaggtagtcaacacctcttccggatcgctgacattaaaccctgccattcccatcgcttcggccacttgagcaaagtctggattcaacatatttgtctgccagtccggcaatccggccacttccatttccaacttcaccattcccaatgaacggttgttgaatacgataattttaattggtaacttatattgtacaacggtttccaagtctcctaaagtcatagacaagccaccatctccgcaaagcgccactacctggcgatccggataagctagtgcggcaccgatggcttgcggcaaagcatttgccatagaaccatgattgaaagaacccagcatgtggcgtttgcctgtcgcttgcagataacgtgctccccacacacaagtcattcccgtatctactgtgaacacagcatcgtccgaacttagtttgtctatttcggacatcacatattcgggatgaatcttatttacgtcgcctttatcttccgtgtaagcagccagatccttctttacgccttcatatcttttgagttgtttcaacaggaacgaatcatctgtcttcggattcagcatacgcaatagactttggatgctcagtttaacatcaccgcaaagtccgatatccacctttgcacgacgtcccagacgttcgggctttatatcaatctgtgctatcttgatgtcatccggcaggaaagcggaataaggaaagtctgtgccgagcatgagaagcacttcggcttcatgcatactgtaatagcctgacggcattcccaacaatccggtcatacccacttcatacggattttcatattgcacctccatctttcctttgaaagtatataccaccggagcattcagcttctcggaaagcgcgatcacttcctcgtgagctccccggcaaccgatgccgcagaaaagagtgatacgtgtatgtttgtttaacatgtcagctaattgagccagatcttcttccgacggacaaacttccggtggggcaggatagttgataaccgacgagtcgacggtaacggcagaagcctttgccaagtcacccggaagcccgataacggacacccctttgcgggtgacagccgtttgtatggccgactggagcatacgtggaaattgtgtgggagtagtggctacttcattataataactgcaatcgttaaaaagtttgatggtatttgtctcctgaaaatattccgtaccgaactctccggtaggaattgtagaggcgatggcgattaccggtgcgccggatcggtgtgcgtcatacaagccgttaatcagatgaacatgtcccggcccgctacttcccgcgcagcatcccgggcgaccggtcagttgtgcttctgccgcagcggcatacgcccctgtttcttcgtggcgcacatgtatccattttatttgatcgttttttctgactgcttcgtttacttcattcagactgtcgcctgttacggcgtagatgcgttcaactccggattttaccagagtatctatcaactgttctgctattttttttgccatagctgtaattggtttaggattgatttttatgtaataacagatggctgcaaagaaaaattctgatttaacatatgctaataacgcctttgtgtcgggacacatcaccgcttttatgttaaaattaattctgtaacaactttttagtaaagatgtataaacaattgcaatatccttttgttatctttataggcgaaatcttaacctaatgtattaaacctcttaattactctagaaaaatgaacagaaatgaaatcggtgtgaatgccggtaaggtttggcaactgcttagcaataatgagaagtggagctatggacttttgaagagaaaatccgggctgaaagataaagagctgggtgccgctttggggtggttgtcaagagagagcaaaatagagttcgatcagtgcgatgaagagctttatgtatatctctgtgtgaatgtttatattggctgaaagagtttgacgctttaacgagaacagaagaatctccggaggaatgacagcatagtcagcacttcggagattctcgttttttatcctttttctgctttatgtatcttcctttcaatggatttccggaaataattctgttactttgcatcacgaattaaaatgtaagaaacaatgagaagttttgcctccgacaataattccggtgtgcatccgttggtaatggaagcattgaaccgggctaatatagaccattctttaggatatggcgatgataaatggacagaagaagccgtagcgaagataaaggaaacctttacgcccaactgtgtccccttgtttgtatttaacggaacgggtagcaacgtggtagcattgcagctgatgacccgtccgtatcattccatcttttgtgcggaaacggctcatatctatgtagatgaatgcggctctcctgtgaaaatgacaggttgtcagattcgcccgattgccactcctgacggtaaacttaccccggaattgatgcaatcttatctgcatggtttcggcgatcagcaccattcacaacccagagccctctacatctcccaatgtaccgaacttggcaccatctatactcccgaagaattgaaacgtctgacagactttgcccatctgaatggtatgtatgtacacatggacggagccagaatagccaacgcctgtgccgctttgaatctttccttaaaggaactgacagtagactgcggagtcgatattcttagttttggcggaacgaagaacggactgatgatgggagagtgcgtgattgtatttaataaagacctgcaaccggaagcccgcttcatccgtaagcaatccgcccagctcgcttcgaagatgcgttacctctcttgccagtttacggcatacctcacagataacctctggctgaagaatgccaaccatgccaatgcaatggctgccaaactttacactgaattgaagaaactgcccgaagtaactttcactcaaagagccgaaagtaaccagttattcctcaccatgccccgcccggttatcgaccggatgctagagtcttacttcttttatttttgggacgaagagaagaatgaaatccgtctggtgacttcttttgataccacagaggaggatgtagacgagtttataagacttttaaaacgttaaaaaggaaatccggaacaacaaaagcgcctgaatatctgtttttataggaagtttgaaactaactttgtccgcaaagttttctacttcttatgattatgaatactagacagaacaggctaatcatattcgcgcttttgttgttgacacaaaccccgttgggcgcacagctgcattctactaaaattgaactgccggagggttctatatctgcaaccatggaagattccattccggcaaagcgcagtttctttaaaaagtttcttgattacttcaatgacgccaataaggaaaaaaagaataaaaagtttgatttcagtgtgataggcggcccacattattccagtgacaccaagttcggactcggactggtggcagccggactatatcgcaccgatcggaacgattcgcttcgtcctccctccaatgtctctctttacggagatgtgtcgactgtcggcttctatctgttgggaatccgtggaaaccatctgtttccgcaagacaaataccgcttgaattacaatctctatttctattctttccccagcctgtattggggacggggatatgacaatggagccaactctgataatgaaagtgactataaacgttttcaagcacaggtgaaagtcgattttatgttccggctggcaaagaacttctacatcggcccgatggccatattcgattatatcgacggacgggactttgataaaccggaactatgggaaggaatggctgcacggaccaccaataccagcctggggctttctctcctttacgattcacgtgatttcctgacaaatgcatctcacggctattacttgcggatagaccagcgattcagcccggcttttctcggcaataaatatgcgtttagcagcaccgaactgactaccagctattatcagcccgtatggaaaggcggagtgctggcaggacaattccacacattgcttacctatggcgataccccgtggggattgatggcaacgctgggaagctcttactccatgcgcggatattacgaaggacgctatcgggacaagggggcaatggatgcgcaaatagaactccggcagcacgtctggaaacggaatggagtggctgtatgggcaggagcgggaacgatttttccacgactctccgagtttactccgaagcatattctgcctaattatggtttcggttatcgttgggagtttaagaagagagtaaatgtacgtttggatttagggtttggcaaacaccagaccggatttatttttaatatcaatgaagctttttaagaatataaagaattggttggagaatcaggaacatttgttttatctgttcctcttcatcttgatagtacccaaccttgtgctctgtttgacagagcctttaccgttgatggcaaaggtgtgtaatgtgcttttgcctttcggctgctattatctgttgatgactttgtcgagaaactgtggcaagatgctttggattttattcctgttcctgtttttcggagcctttcagattgtattgctttatttgttcggccagtccattatcgctgtcgatatgtttctgaacctggtgactaccaattcgagtgaagccctcgaattgcttgataatctcacacctgccattattgctgtcatcatactctacgtacccgctttgatattgggaaccatttcaatagtacgcaagcggaaactcacagcagaatttatccgcagagaacggaagagagcctccatagtctttggaatctccctccttagccttgtcggagcatatatgcaggacccgggatatgagttgaagtccgatttatatccgctgaacgtatgctataacgtaggtctagccttccaacgaaccgccttgacgcagaattatcaccgtacttcgaaggactttactttccatgccctgcctacgcatccgaaagagaaacgggaagtatacgtaatggtcgtaggagaaacctcccgtgccctgaactggcaactgtatggttacgaacgtgaaacaaacccgctcttatcccggcaatctggtctgattgctttcccgaaagtactgacagagtcgaatacgacacataaaagtgtccccatgttgatgtcggacgctactgcctgcaactatgattctatctatcatcagaaaggaatcatcactgctttcaaagaagcaggtttccggacagcctttttctccaaccaacgttacaaccattcgtttatcgacttcttcggaatggaagccgatacgtatgattttataaaagaagattctgtcagttcctcctacaatccttctgacgacgaacttctgaaattggtggagcaggaactggctaaaggtgcgacgaaacaattcatcgtgctccacacctacggctctcactttaactaccgcgaacgttacccgtcggaaagtgctttctttacgcccgattatccgatggaagcagaaagaaaataccgggataacctgatcaatgcctatgacaactccattcgttatacggacggtttcttgtcacgcctaatccgcatgttggaaaaacagcagatagatgccgccatgctctacacttccgatcatggtgaggatattttcgacgattcccgccatctgttcctccacgcttctcccgtaccttcttattatcaacttcacgtgccgttcctcatctggatgtccgacaactaccttgaaacctatcccgaacattggaaaaatgctgtggataataaggataagaatatttcttccagcagctctttcttcccgaccatgttgtctttagccggaatagaaactccttaccgggatgattcgcaatctgtaacggcttcgcactacgtcctaaaaccgagagtttatctgaacgatcacaacgaaccccgtccgctggatgatttgggcatgaagaagcaagacttccggatgctggaaaagaggaatatcaagtattaagtattaggtattaatccttgttaatttttgcatccaaaagcgggattggcgtgttatttgccgtatgatgtatgaacgattaaattcataaaacatggcctatatagattattacaagattcttggagtagacaaaagtgcttcgcagaatgatatcaaaaaggcttttcgtaagttggcccgaaagtatcatcctgacttgaatcctaatgacccgagtgcaaaggataagtttcaggaaatcaatgaagccaatgaagtactaagtgatcccgagaaacgtaaaaagtatgacgagtacggagaacattggaaacatgccgatgaattcgaagcgcagaaacgtgcacagcaacaagccggaggctttggcggtgcaggaggtttcggcggattcggtggtgcaggtcaaggtttctccgacggtaacggaagttattggtatagttccgatggagagggattctctggtggcaatgccagtggattttccgatttcttcgaatccatgttcggacatcggggaggaagaggacaaggctctgcgggattccgcggacaggactttaatgccgaacttcatctttcccttcgtgatgctgctcaaacgcataagcaaatattgactgtcaatggtaaacaagtgcgtattaccatccctgccggtgtagccgacggacaggtaatcaaactgaaaggctacggagccgaaggtgtcaacggaggacctgcgggtgacttgtacattacgtttgtgatagccgaagacccggtgttcaaacgcctgggcgacgacctgtacgtagatgtggaagtagacctttactctgctgtattgggaggtgagaaagtgatcgacacgctggacggtaaagtgaaactgaagataaaaccggaaacgcagaacggtacgaaagtccgactgaaaggtaaaggattcccggtttataagaaggaaggacaattcggtgacttgattgtgacctattccgtcaagattcctacgaacttgaccgacaaacagaaagagttgttccgtcaattacagagtatgaactaaaatgaatgagcactatgcagaccgaattaattattgtcagtgaatactgtcacaaatgtcatattgagccttcattcatcgacttgttggaagagggcggtttgattaacgtacataccgaaggcggcgaacattatctgcttttgtcggaactcccgaacgtggaacgttacagcagaatgtactacgacttatccatcaatatggaaggtatcgatgccattcatcatttactggaaaagatggaagatatgagacgcgaaatgagttcgcttcgcaaacaacttctgctgtaccgggaacgggaaatagaagatatggactggtaaaaaaatagagcctctgtttgatccgaacagagcctctgttttttcaggacgtttgcacggtcgccaacttatccaatatacgtacaaatctcttccagatagcgtgcgtcgatggtgtcgaaactatccagttcatcactgtcaatatccagcactccaatgacttcactctgttggaggatcggtactactatttccgatttcgagtccgaactacaagcaatgtgtccgggaaactgttctacgtcaggaacaatcagtgtccgggcctctttccaagctgtgccgcaaactcctttgccgaggcggatgcgggtgcaggcaatgggaccctgaaacggacccagtacgagttcatcctctttcacaaggtaaaagcctacccaaaagaaaccgaaagtctgtttgagcgctgctgcaacgttggcaagattggctatgagatccgtttccgtacttaccagagcgtgtagttgcggaagtaactcccggtatttctcttccttatttcctgtgccgatgattaaattctctgccatctcttttctatttgatttggttcaggatgcttgggtcttttatcttatcgtcttctgcaaagaagataatcttagtcaatatttcggctgtcttcggatcttcatctacaaaaggcaggaacaggcgtccgcgattttgcgaatgtaccggaagaacggcaatttgcgcgccgccttcctgatggatcacgccgctgcccagatggatattgtacttacccagtttgccttcgatgtgagcgaaacttccttttatcgtcacgttcttgaaatggaacaacggcattgtcagttccactaacatgctgcgcatctcgatggtagagtggctggtttccggatcgacgcttccggcatgggctacacttactgccaagtctacgtccctcatcacttccgagaaaatgacaggaggaatctccgagattttcatcagcttgtagtccttgcggttgtggaagcagacatattctaacgtcggagcttcgatgtcggcaggagagaaccagtctgccatcgcatagatggtggcgatgatgttctctttgtaatagatcttttgcaaaccgtcttcgtagtcggctacccagcgacggcctttcagtacggcaaccgttttctgcggttggatctgattgccggcgtaacggcgggattgagtggcttccacttcttccggagtcggaacatagagctcacggaacacctgtttgaaaggctggcggattgctttgtcgaacaggaatttctgataggcgtgccagtcaccacttgcgtacaagtctgtgggatgggcgatgcgtaactcgtctttcggttttaacggtaggcaaacggcatttacagtcaccagcaatccgtcggtgtagaagcccgtctgtccgttacagataaagacaagatgtctcaacaatggccagatgacagggttctgcatcaacttgcgcaattcgctttcttcaaaacgggtacagtcttccatcgcctgttccagcatcacgcgggagcgggtgtactggtctttcagctttttgtgtaccgctttcagttcttctatatacggatgctttttcagtttggcaggcatactgttgagctctttgccgtctttgatttgtttaatctccgatttgccttcctcgttgatttgtacgtacacttctacattgtctatctctttgggagacaggtaggggagaagttctttgattagttccgtttccatgctccaggtcagacgggtaacgtctccgtagccggagttacgtgccaggttttgcagggcgatgtttaccgctttcttttcgctttcctgcctttgagcaccgaattccttactctctttcaggaacttttgcaggtattgataacgatccagcagttctttgtccggtttccgtcccaatgggatgaggccgtagctcatcaataagtctttgttgcgtttggcaactatttctttctttacatctgccgccttcaccgcgccgttggtggcatcggcaaacttgcgggcacgggtatggctattgctgcatgagatatatttggcggcattgtagaccacttcgaagcgtcgtttgccaattgtcttaaatgcatccctgaaccagtcgatatcaaaagcaccttcccgcaagtcttccacgtcgataggggtgtagcgggcgatgattgcttttttcttgtcgtcacatgtttcattggtatgggcgtggaaataataggcggcacttgtcagtcctttccagcctattgccttttcggtcagttcaatccattgcggagcgaacatggcggcttctaccagtcgctcgtcactgatttcggcttgcttcgccagtttcttcagattttcgctggtatctgtcggcaggggatggcaagcatggagcaagctgctcaatacgcctcgtttggtgctgccccagttgtagctgtcgcgtatgaacgtatctttgccgaatgcttgcagaatgtggataaatgtgttcgctccataaatataactcaattcctctgcaaggctggtgacttgtgtctcggagtctccccgttttagttcgatttcaagaatccggtctactatcttctgtgcaagagaacggaagagagagaaatcgacgtttttgatgtcggcgtatctttctttttccttattgaaacgaatgttgtcgttcaatactgtggtgattgccttgatctgggcgggcgagctgatgcgtcccatcatttcgcggtatacttcttctgtcgggatgattccgagcatccatgcacgggcgaagtccgtggcatgaaggtaagagtctgtctcttccagttcgggtgtgtgttccatgtagttggtgagcttgtaaagttggtagcgcactgtgaagtagcggataaacagatcatcactcatgggcttttgaggcatttcaagccagaaattcacgaacttgttgttgtgtatcggataaacgatctctttttctccatattccagtttgtcccgaagccatgcatgcttgttggtgtactggcggaaaatgtttttagtattcagcaaaggcaacagttggagcagcatattgacagccaatcgttggtagactgcttcgtctttatactcgtatgacaatgcttcgataatatcactcatttgttcgtagtacggcatcttgcggagttccttctgcaatccgcggtaagtgatgccggcatacatccggttgacaagcggctcgaaagtgttgcttgatttctggtctgccttgatgtcttcttcatcctcttcatcgtagtcgtcatcgtcttttggggcacctgtcgatgcaagcatgaaactcatcatcagtaatttgtcatagcttcctatttcttcttcgtagaaggccttccacagttccgggaaaccgagtccgctcaatcctccgtagttgctccagtttatcaggacactgttacctaccaggcgtgcttctccgtatccattcttgaactcttcgttcttatagatttcgatgtatttgcttagttttttaaatacaagtttagcccttccgaaacaaatgaattcgaatgcttttttcacgttgaatcctttatcctgggtaatttccggcagattgacttcaagagccgggtcgtacagaccgaagccgttatctttggtatagtgctgtgcggtgttcttttccgttccgtctccaatcagagattctattaacactttttctttcgcgttcggtttctgaatttctttgacggtagggattagttcctgataggtatcttgcagaaattctatgttgtgaatagtcttcatcatatccaatccggccaggcggcgttcggccaccttgtctgttagtaagcggcggatactgccggacaattgttctttcggctgtttcatcaatagattgatggcgttgatacgcatctcactatatttgaagcgcagcaactcttctactttctgattctgttcgggcgacaaagtcatctcggacaagactttgtaggcttcgtcacgaacgtcctgcgaacggtcgcccagtgattgcagcacatattcttcctgtaaatggctggtcgggggatttaatacgacaccgatatagcctgcccgcatataggtatccaaagaaggcagacaagtgcaaagatcgtcttttaatgcagaatcgttggtcatccaggtgatatacgccatcttgagaacgatttccgaacgggtgagctctgcactttcccatgggaatacgtatggagaataaatctctttggcagagatggactgatagacgttcttcagatagttataatggcggatcgcttcttctttgctatcaaaataatcatggagtgatggggcgtccttatgtcctccgtaccggctaagatagagcccggacagatacagtggcaggatagccgccactaccgacggttcgttgtaccatttttcaaaagcatctttactgatacggtggttcatgccggagtattgcgtacagcgtaaaaaataaagtaaggtctgcacctgatatttggcaccgtctttaattattcccggaacaagtgcctggatttcttccgtattgtagaatccgatactccatagagccagataaagttcgaccgtatctttactttgaagggctttgcgtgcttcttcccggtcgttcagaaaacggcggatcagttccacatatttgttggtgatacgctcgctgctgtcttgttctccaatacccgtacagactgcaatgccgcgtttcacggaggcaaatcgttgcaggccgttgtcgcagatcaccgagaacagatggagataactttcggggcatccttcgtccatcgtttccacgatagcctgacggagaccttcctgcagtttggctgccagcagtaactttccttccagttccagcaacgggcggtaaccgctcacggcgatagcttggagatgtccctggttgaggcggttggcattattctcgctggtcaatacgttgttaaggtattcaatgacagtctggttgccttctgctatttgggcggccatccagttttggcagttcatcgcatccttgtatgtttctatttcttccggagtgtttcctccgttcagtatggcttgttcgctgaatccggtggcacgtagttttagaaattccgtcagtgcatctatgatgtggctgaaatgcagaagaggattcgccgaccgctgtgaccggcgcgaatatccatgagtgtacggacaccgtgctttgagcttcagataggtgtggaacaggttagcatattcgtctcccaatagataacggagcactttgttcaactttccgtcgaaaagattggcaacactctttatcttctcttcctgaataatatgtatgatgcaaggctctagtttatcgctgtatgcgccataccgggtatccatgttgaagtattgcataaatacatccaacagtgtcattgtctctttgtccaaactggttctctttttcgttaacctttccaggtacggagcaatccgtttgtttaatgcgtcattataaatgagtctcatgattattttcgttttaagtgtgtttataagaaaatgattaccaaagtcttcccgacagcatagccaatcggatgaaggtgatggtagattcttctttgagtccggtgggagaggataagtcttcagtttccgtatcgtcaatgaagatacggaaaattccgtcctcgtaagattgcagggcattggtgattgcttctacttctgcggcaggtttgccgttatagtttactgcaaacccaaccttgccggaagttgctttattttccacttcttcctgtgtgaggtatttcagtacttcgctttgttgcaagcgttcattatattcacagacttgccaactgacgatggcttcaatcaacccctgtacatcgacaggcggaacaggaaaatcgacaggaatcttttcgatattgcactttcgctttcctaactgtttgacttggacatatactctcatattctctttattgggtgatctgaatacttgatgtaatagcattcagatcggtttcggcttcttcatcatagacaagcatgacaatggtaaaagttcgcttcttgctttcttggaaatagtgtaatacaatttgttgtatgtcttctcccggttcatcaggagctccgatgtgcagagggtttgtagttcttgtcatggatagcccgttgatgttgacattgctctgcttatagtcttccgatggttctccttgtgcatttcgcgggagagtgagcgataacttcttgatatgttcaaactctttttgtgtatcgtaggtaagggcagtaactgtcagttggttggcaccattggcaagcctgagcaacggaggctctgcgctgggagttaatcctttcgctcccgttattttggtccagttggtaggatactggcaactgaaatttgtttctgcatcgtaataagaaagccatgtatcgttattgcctaccggaatgtatgaaggatattgcctggtggaagaactgttggcagtctccatgtccgattggttaccatcttcgttctcttcttccagttcaccattcagataggcttctacaatcccgctttcccattcgctgcgtatgtcttgataaagaggggggacattcttgcaaagcataataaagctgaacaggaaaatgcaaaatataccaagctccccaaggattgaaacggtgcgttgcgcatcggctttttcaaatttatagctgcatacatagatgattcccagtaggaaaccgcttaataacccgccgatatgtgcagcgttatcaatcccggctttcatgccataaaccaggttgtaaccgacaaaaataaggatactggtcaataacgctttccgttgttcctttgcgatgcgatgaaagaacaggaaggcgaggaatataccgtagagtccgaagatggctccggaggctccggcactgattgtctctccgtgcatataaagactgaataccgccgagcataatccggtcagtaaataagacatgaacatccgacggcttcctatcagtccttccagtagaagtcctacgtacatgaaagcgtacatattcattagtagatgaaaagcaccgatatgtatgaagttgcaggtcactgcacgccaccagtcgcctgtaagggtcagcggtccgaagtcggctccccatttcagcagtgataagatggaaggagacatgattcccactccggatgcaatcatcacaataaatacaaggatgttgaggtctatcaggataggcgttgccataaaacctttgcggggaataaagaacgaccagaaagagttccttttcttttcttcctccagataggctttctcttcttctgtgagcggacgattacactcttcctcgaaatcttttgccttttgggctagctcttccggggtaagggatgtttttatttcttccatcgtctcccgtagcttttgtatattttttctgttctttccatagtctacaaattgtacggaagaagattggctgcgcacagctacttctccgtcgcttcccgattctatggtgaaggttatttcctctccatgagaatacatattgaacgggacttcgaatcgtgctccttccggagtgacttcctcgatattccactccagcttttgcgaagcttcgagagccagtataaggatttctgtttttgataaacccggtaaatgcagtttgtcgttatatgaaggtttgagtgccatatttctattcttatatagagtcgtcgattaaaaattacttatctcactgacaaatgtatagaataataatgaaaaataatagaatgtgacaaataaaaaagcatccacttcctaagaagggatgcttttatgagatttgatagagtatttattactttttatagaatgccaagtcttctttatcgaagttttcgatgaagtttgagtgcttttctacttccgcttctgcatagttcaaatatacatgtgcagatttggagaacagttcggaagacttgctggcatcttgaatcaacaggtgacacatgataatgtcagcagccatttccaccagtttgcgagcggtgaagtcaagcaattcctggtcttgtacttctttcactgcattggtgctggcttcgaatttgtcagccatctttttcagacgagacatcagcggttccatttccggtgagcaaggaatggtttcgaactcgcggatggtagcgatgtatgaaccattggttacgtaacggatagcagctacggtctgcaactgggtagttccttcgtagatgctggtgatacgtgcgtcgcgatagattcgttggcaagcatattccatcatgaaacctgaaccaccatgaatctgaatacagtcgtaagcgttttggtttgcatattcagagttcatacctttagccagcggagtaaagctgtctgctaatttagcatatttcttctgttcctggcgttcttccggagtcagtttacgttcgcgggcgatgtcgtctaatgctttgtaaatgtctacgtagcgagatgtttgatacagtaaagcacgtccggcatccagtttgcctttcatgatagccagcatgtcatatacagccgggaattcgataattgcttttccgaactgcttacggtctttagcgtatgccaaaccttcattgtaagctgcctggctcaatcctacagattgtgcggcaatacccagacgggcaccgttcatcagagccattacatatttaatcaaaccgagtttgcggtcaccgcaaagttcagcttttgcattcttatataccaattcgcaggtaggagaaccgtggataccgagtttgttttcgatacgacgtacgttcacgccaccctgacgcttgtcatagatgaacatagacaaaccacgaccgtctctcgttccttcttccgaacgtgccagtacgaggtgaatatccgcgtcaccatttgtgatgaaacgtttcacaccgttcagtaaccagcatccgtctttttcgctgtaagtagctttcagcataacagattgaaggtcggaaccagcatccggttctgtcaagtccattgacatcgtttcaccttggcagatacgtgggataaagcggctgtgttggtcgggattgccaaactcataaagagtctcgatacagtcctgcaatgaccagatgtttccgaaacctgcgtcggcagcagccacgatttctgcacacatggtgtacggggtgatcgggaagttcaaaccgccgaatttacgtggcatggtcataccgttcaaaccggcttttaccattgcgtccaggttctgtttggttcctgatgcatattctacgcgaccattggcacagtgaggaccttcttcgtctacaccttctgcgttaggggcaatgatttctcctgtgatttctccggtaatctccaacactttgtcataagagtctacagcatcttcgaagtccagcggagcataatcgaattcatctttatctctgtaattgcgttctttgagttcgcaaatacgtttcatcatcggattgttcaagtgaaacttgagttccggtatgtctgtataataattagccatctttccttacttgctattttgtttataatacttgatcatcttcggcacaacttcttcgatagttccgttgattacgtaatcggcaatcgtgttgatcggagcatccgggtcgttgttgatggagatgatgataccactttcctgcataccggcgatatgctgaatctgtccggagataccgcaagcgatgtagagtttcggacgaaccgttacacctgtctgaccgatctggcggtcgtgatctgcgaaacctgcgtcgacagcagcacggctggcacctacttctgcatgaagttctttagcgaggtcgaacaacaggtcgaagttttctttcgaacctacaccgtatccaccggcgatgatgatcggagaacctttcaggttgttctttgccttttctacgtggcgttcgattactttcactacatagtctgtatcagctacgtactttttcacatcgtgacggatcacttctccctgataagtcggagagaggatttctttcttcatcacaccttcgcgaacggttgccatctgcgggcggtgttccgggttcacaatcgtagcaacgatgttaccgccgaaagccggacggatctgatacaacaggttcttgtaagtcttgccttctttcttgtcttcgtggtcaccgatttcaagtgaagtacagtcggcagtcaatccgctggttaaagcagaagaaacgcgcggaccgaggtcacgaccgatcacagtagcgcccatcagacagatttgcggctgttcctctttgaaaaggttcaccaggatagctgtgtgaggaagtgaagtataagggtaaagtccttcgccgtcgaaaacgtgaagtttgtctactccgtaaggaaggatttgtttttcaatatctttgaggccggttccggcaaccactgcttcgagctgacagttcaactggttggctaacgaacgacctttggtcagaagttcgaggctgacgtctaaaacgttaccttcttctatttcgcaatatacaaataagttattcatgattatccgatggtgtggttagctaatagttcaacaatcaggtcttccacgtcacggtcgctgccgctgatggttttgctctctttagcctggaacacgatgttctggatggctttcacttttgtcggcgaaccggacagaccgcattgtgcgaggtcaccgtttacgtcggctacgctccattctgccagattcagataatcgcgcttgtcgtacaggtctgtatagtcaagattgccttgctgtttttcagtcacagtcttggcatgcttgtatttctgaaccaatttagcgttacgcggacggcaaggagctgcagaaccgttgacagtaatcacgataggcagcgggccttctacagtttcaacaccaccgtcgatgtgacgtttcaccttaatcttaccatcgcccacttccagaatttcttctgcgtatgtgatttgcgtcaatcccagcttttctgctacctgcggacctacctgtgccgtgtcaccgtcgattgcctgacggccaccgataataatgtcatactcaccgattttgcggatggcagtggcaagtgcgtaagacgtagccagtgtgtctgcaccagcgaaagcacggtcagttaataagtaaccgttatctgcaccacggaaaagtccttcacgaataatgtcggctgcccgtcccggtcccattgtcagaacggttacggtagagcctggatgagcatctttcaatcggagagcttgctcgagagcattcaggtcttcggggttgaagatggcggggagtgccgcgcggttaatcgttccgtcggctttcatggcatctttcccaacgttacgtgtgtcgggaacttgttttgccaatacaacaattttcaaactcatgctataaattttagtattagtatttctacaagttagcagccagtagtcaagtagtaatctcttgctatccaaactatccggttaactatcagcgtgcaaatttactcaaacgcttggttctgacaagaaatccaagcgaaaaatgtatattgttaagcatttctttgttctgttagttatatgtatatcactgttcttttcgataaaaaagggtttttgtattgtttatgtgcaactaatatgtttattttgcccgctattatttggtaatattatggaaaatgataaaagacaaatggagaaggactttcaatctttcttcactgttaactttcctaaagtgaagaactttgctcgaaagttactgaaatcggacgaagatgcagaagacgttgctcaagatgttttttgtaaactgtggcaacaaccggaactgtggcaacatcctaatgataaattggatgggtatatctttgtaacaacacggaatattattcttaatatgtttaagcatcagcgtatagagcaagagtaccaggtaagttttatagaaaatgcgatactttgtgaaataatagaagatgatcaggcactaaaggatatctattataaagagttgcttatgattctccggcttgctttaacaaaaatgcctgagcgtcggaggatgatatttgaggctagtagatttcagggactaagcaataaagatattgcggaaaaattgggtgtttctatccgtacggtagagcaccaaatttatctagcattaatagacctaaagaaaatacttctttttttagtttttttctcttctttcttaagtagtataatgattttagttgtctttaaagtataaggcagaaataataatgaaataatgatgaagaattatattcgacaagtgatagaactttttagtcagaatgactatccggtttccgtccaaaagcaattccggcattggttggctgatgaagaacataaggaagaaaaaatggaagcgctcgcttctctttgggaagaagctggacagcagcgagttcctcagggaatgcagcagtctatacgccgtatgcaacaaaatataggtatgcgtcctgtctcttcgcaaaagaaatatatattacgtatttggcaggtagcgtcggtgttgttgctggctgtatcgtcggtttctatctatttattattggagaaagacgatttttccagtgatttgatagaatgccatataccaactgcagaaatacatgaactgacattaccggatggtacttccgttatgttgaattcaaaaagtactttgttttatccggaaagttttaatggtaaaaccagaagtgtatatctgataggtgagggctattttaaggtaatgccggataaggaacatccctttattgtgaaaggatctgattttcaggttacggctttgggaactgagtttaatgtaaatacttattcggagaatgacgaagtgtacactactttagtttcgggcagtgtaaaagtggagtatgataatttaatctcaagtgttatattgaaacctaaccagcagttatcttataataagctgaccaaaaaaagtcgtttgcaacaatcacaagttgatgatgtgatagcttggcaacgtggagaacttgtatttagtgatgcacatttggaagatatattcacgagactagaacataagtatccatatacttttgtatatagtttccatagtttgaataataatacttatagtttccgtttcccgaagaatgtgacgttggaagaaattatgctaattatttcacaagtagttggagatatccactatgtgattaaagacaataaatgctatataactaattgaaaaataacccctatgtctaattattaacttaacacaccatgaaaaaaaatatccggagggaactgccattccttccggatatgaaatcgaaaaattccttaatattagcgtgttactaacgcaatccaatcaaaatagaattaataaccaatttactaataccaggaaaatgctacaaatgtataaagaaatagcaggacgagtgctccaaaaacaggtttttcttacttttttagtattattaatgatgcagacctctgcttttgggcaaaaagatagtaaaataactatccaacagaaaaatatgactgtaattgaggctttaaaatctgtggaaagacagactaaaatgtctatcaattatagtgattctcaattgaaaagcaaaaagcttaccaatctgaacttgaaaaatgcgcttataactactgcgcttgatacaatcttaaaaggaacaggtttcacttatcaaatccgtgataattatgttatagttaccgaacaaaagtcggtagcgccttctgtagtgaagaatataagaggcaaggtagttgatgaaaatggagaaccactgattggcgtgaatatctcggtggaaggtagttctacgggaactataactgatatgaatggaagctttatgataaaagcttccgataaatctaagttgaaaatatcttatatagggtatgcaactcaaatgattgccgtttcaaataaagatttttatcaggttgtgttaaaacaggacgctgaagtcttggatgaagtcgttgtaaccgcattgggtataaaacgtgcggaaaaggctttgtcatataatgtacaacaggtgaaaggggatgaattgactactgtgaaagacgctaacttcatttcttcattgaatggaaaggttgccggtgttaccattaattcttccaattcaaccggtggcgcatcccgtgttgttatgcgtggtgtaaagtctatcacttcttccaacttggcgctttatgtgattgatggtgtgcccatgtataatatgatgaatggtggcaattcacaaagcgtttttgctgaccaaccgggtacggatggggcggctgatattaatccggaagatatagagtctatctctatgctgacaggaccttccgctgctgcattgtatggtaatgctgccgctgcgggtgtagtgctgattactactaaaaaaggatctgttgacaagacgtctgtgacagtatctaacaatacaactttctcgaaagtggcgatgatgccagaaatgcagagtaagtacggaaatgtggcaggaaatgtggatagctggggaccgattgtgaatagcgattatgatccgcgcgatttcttccgtacaggtagtaacgtgataaactctgtagctttgtctaccggtaatcaaaagaaccagagttatttgtcggcttccactactaatacaacgaatatcctgccgaacagtggatataaccgttataatttcactgtacgcaacacgaccagtttcttgaaagataaaatgacactggatgccggtgcaagctatattcttcagaacgataaaaatatggtatctcaaggatattattataatccactgcctggactttatcgattcccccgttcggaaaattttgaggatgtgcgtatgtttgagcgttacaatgagggtttaggtataatggaacagtattggccttacggagaaatttccagtggactggcaaatccatattgggtacaaaaccgtcagatacgtgagaataagaaaacacgttatatggtgaatgcttctctgaaatatcaaatatttgattggttggatgtcacaggtcgtgtgaaaattgacaattatgaaaatcgtaagacatacaaggcgtatgcttctaccggtagtctgtctgcaggagacagaggaacatatcatgatacttgggctcagtcaaagactacctatgcagatgccattgctacagtaaataagaattttagcgattggtctgtgaatgtaaacttgggtgtatctttgaatgacagtcgttatgaatcgatcggatatgaaggcggcttgaagatttataacttctttgctgttcataatttggattttgataaagcatggaaaccaaagcaagagggttggcatgatcagactagagctatctttgcgaatgcagaactaggttggaagtcaatgctttatttgacggtaaccggacgtaatgactgggattcaagattggctttctctgattataaatcattcttctatccgtcggtagggctttcggctattcttacaagtatgtttgatacaccggaatggttaagttttttgaaagttcgtggttcatatactgaggtaggtaattcttacgatcgttttatgactactgtcacttatccatacgatgaagcatcgcataattggaacacgacttctgtttacccgaatactaaattgaaaccagaacgcacaaaatcatgggaagtgggggtagacgccagatttctgaatgatatcagtttcaacttaacttactatcgttccaatacttacaatcagactttccatgcaactttgtctgcttcttccggatattcatctattcctatccaaagtggaaatattatgaatgaaggtattgaaatgtctttaggatatgataagaagtggggggatttctctttcaacactaattatacgttgacttggaatcgtaatgaaataaaacaattagctgatggcgcttataattatgctaccggagagccgatcgtaatgccggagttggatgttttacattatggacaattagatgcccgtctgcttttgcgtgtaggtggttcaatgggagatgtatatggtcagaaagtgctgaaacgcgatctcaatggatatatccttaatgaggaaggagtaggtcttgcccttgaaaataaggaaacgcatttggggtctatcttgccaaagatgaatatgggatggaatttgggattcggatataaaggcataaatctaggtatgacatttaccggacgttttggaggtattgtactaagtgaaacgcaatcagtattgaatgctgccggtgtgtctaaaattagtgcggatgttcgtgatgcgggtggcgtaccgattaatcaagccaaaatagatgcacgcaattacttccagacaattcaaacagcttccgtttactacacatatagtgctacaaacgtgcgtttgggtgaattaagcctgagttatacattgccgaagaaatggtttgccaataaattaggtatgactgtcggacttgtaggaaagaatctgtggatgatttattgcaaagcacctttcgacccggaactgactacctcggctgcgtctaatttctatcagggatttgatgcatatatgctcccaagtacgagaaactttggatttaatgtcaaatttcagttttaaatagtaaataggtatgaacaagataataaaatatattggagcaagtgcggttatatgcttgatggcaggatgtactactaattttgaggatttcaacaccaatccgtaccagccttctaaagtgccggctaatacattgctgtcgggaatgtttaatgtatatgcagcacctatgcaaaatgactgtcagcatataaattgtatgtgggcttgttttagcggacaaatcaccgcacctagtacttggtcaaaaggggaaaatctttttgcttattataatgcgatggaggatcataacgctgctacctgggctaaaatatatgcacgcatttatcctaacttcttccggattgaggaagctacggagaaaaagggtgttatctacgctatggctcagttgacacgtatttatgcaatgcagatgatggcctccctgcaaggtcctatcccttactctaaagtgaaatcgggtgatataagggctgcttatgacgatgaaccgactgcctggcgtgccatgttcgatgatttggataatgtaattgctatattgaaatctgcagcggaattggggattaatcaggatttggcagcagtagatcaattttatggcggaaattgcgaaaaatggatgaaatttgccaatacattaaaacttagaatggctatccgggtgtccggagtggcagattatgctcaggctaaagctgaagaagctgtacgtggtggtgtgttggagtctgtttccgatagttcatatgacacaactagcagtggtatcaatgaaaatggctatgctattgtgagcggatggggcgaagtgagagctaatgcttgtattacctcatatatgaatgggtataaagacccacggcgttccgcttattttactaagcaagcggctggcttttctgaagattatgtaggagtccgttcgggatcttcggtagctccaaatccttctgattatcagaattatagtaacctgatgataacgactgataaaacattgccgcaaccggtgatgtatgctgcagaagcagctttcttacgtgcagaaggcgagctgaaaggctgggatatgcagggtgatgcagagactttctatgaacagggaattcggttgtcttttgaggaatttaaagtaaccggagtagatgcgtatttggatgatgataaatcgaaaccgggaaattacgttgatcccaatcactctgccgacaattatagtaatctgtctactatcactattaaatgggacaaaagtgccactccggaggaaatgttggagagagtgcttactcaaaagtggatagctctctatccggatcctttaaatggctggtcggatttccgtcgtacgggattcccgaaaatatttccggcaacacattctgcaaatccggattgtaaaccggctcgcgggcaacgccgtcttcgttttgctgacacagagtataatacgaataaagaaaatgtggaggctgctgtgactatgcttagtgatgggagagactctaatggtaccgatttgtggtgggctttgaaaaattagagattattaatggttaattttaagattatagtatgagaagactaatatatttcatatttgcgtctgtcgctgtactagtatttgtacaatgtagtgactggactgaaatggagaataaatttactgaaccggtgaatattaatagtgaggattactatcgagccttacgggaatataaaaagacagatcatcctatttgttttgggtggtatagtgattggtcgggtacaggtgacgatatgaataaccaattgagaggtattcccgattccatggatttagtatctttgtggggcggtgctttcaatttgacagaagcgcagaaaagtgatcttaaggaggttagggaaaagaaaggaactcggatattgtattgccagcatatcatggatattggtagaagtatgacgcctgtttctgtggagaatgaccatatagtagacggtgtgcaatataactcttatgaagaggctatggcagcttactggggatggtatgcaaccggaaatcattcaacgtacaataatcactatggtgatggctccccagagggtattgaggctgctatccgtaaatatgcacaggttatagcggattctgtcaataagtatgattatgatggttttgatattgactatgaaccgagttggggctatccaggcaatatttccagtcatccggaacgcatgcacattcttcttgatgagttatcgaaaaattttggaccgaaatcgggaacaggccgtattcttatggtggatggagaacctcagactttgaacacagaatctggtggactattggattactatgtgattcaagcatattatagcccgggtgatactgatttggatactcgtttcaataaactgttggctaaatttggatcaatagaagatgaagctgcaattcttcgtaaaactgtttggtgtgaagacttcgaaagacataaatcggacggaggaccgcagtttacaactcgagacggtgtgacgacatattctttgaaggggatgtctatgtattatcgtccgggagtagatgcacgtatcggtggtgtaggagcgtatcgttttaatttgtgccgtccggtgaatgactatttctttatgcgtgaagtgattcaggtgatgaatcctgcccaacattaatactatgaatataactaaaaatgaaaactatgaagatgattagattttctaaatatgtggcattggtaattattctagcatcagtctttggttgtgatgatgcggaaatgaaggccattgataatggattatatattcaggaggccgcaccttctaataaattcgatcaacagataataacgcagttggtagatgatgaagaagttgtgaaaacgctgacagttcgtttagttcgtgctatggatcatgatgtcactgtcacactggatattgatcctcagttgcttgaggagtataataacaaaaatgaagcaaactatttagtgcttccggaagaatatcgaaattttgaaaagacagtcactatctctgctggtaatgtttcagctccggttgttaatcttaaaataaagccgtatagttcttcaaatggtgaggcatatgctattcctatacgaattacttctgtggacggaccggtcgaaatgaaggggaacgcgaatcatcttctttatttgctaacctcacctcataggcaaaaagctgtaataataaaaaaaggaaatagaactgttaagacgtttagtactgccattcctatggaacaatggacttttgaatattgggtgaaggtagataatataacaggggaacctacaggagattgggaaggtttgggaaataaaaatttcagggcacgaatttttgttcctgattcccaaccgctcacattctctgatttaactcttcgctattatgctgatggagctaatgtacagattcctattttacaattccaaaattcagctggtcattttgatactactggattctggtggcctgatacctggtatcatattgcttatacctatgatggtacaacagttacagtatataaagatggtgtaaagaataattcgttagcaaattctattgactggacttttaaaagcctttcttttgctataggaagctttggatatgaacaacaagtagaattcgcacagattcgtatgtggaagaaatgtctttcagagaatgtgataaaagacaatatgtcacgtcaagttgccggagattctgatgggttgataggttattggaaatgtgatgaaggaacgggtaatgagttgaaggatagtagtcctaaccagaaccatgtaactcttggtggaacacttcaatggagtgaacaaattaatttttctcatccgaataaataactcctagtaaaatgaatagaaaagtcgtcacgttaataagtggcgactttttatgtttctaagattgggatctcatattcccacttacggtcgttaagttagcttctagttgtattagaggaatgaataaactaaagagtaattccgaatacaaaatagacctgttcctcgtaagggttagctattaattttccgaatatgggtaaagaaaaattggatgtaattttgagttcttttgttgcggataacccaacgttgactacattgaatttattggaataaaaactttcccaaggtgtaaagcctgcttcaatacttagatttacctccttcacattgaaaggataactcaattcacagtaactggaccaagcgcgtttcccgttttcccggtagtcatttcctgcaaatgtggtgtaccagcttatagatagtggaaatttctcgctaaacatatatccgactcctatttcaaaagtatgtccggtggagtgtgaactgtaattgaaatatttgaaaggctcatcctctgtttgggtaaagtagttattgaagtaaagagtcaggtttttgtactcatattctagtgaaaggtctatttcattattcttttcccggaactcggtggagccccaagcatagacggtcaatcctttccagttgaggccgagtgagggttgcacacttgcattgccgctgtcaataccacgccagatatagctgctgacgaaatcagcatttacaaaaacttcttgtgcctgtgcaaaggctgcgtaaaataggattgcaataagtacaatatgtcttttcattttatcggttgtatttctctgttttcgggtgcaaagatacttaatatataaattaaatgtgaccggatagggcaaaaaaaggaaacgactgcattgtgcagccgcttcgtaatcaattataaatcttaatagtcatttagaaagtgacatccattttcagtacgaaagtgcgtggagcggcaaccgccataggacgatagctgtattctttgttcaataggttatttaccataaattggaacgctacttctttggttgcttttactccaaaacgcaggtcgacggtagcataatccgtattgtgctttttccagtaagtagccagtgtctcgccttttgaatagccgaagagaataccgcgtacatagtccatcagatctttctgctgtttatcacgttcgtccatcatcaaatagtctactgcgagaattttactcttccatgcaatgttggcacctacgttgatacgcttccactggaaatctaccgtagctttaaagctatgtttaggacggtatttcagatattttcccgtatttgatttctccttcatctgtaacgggtcggtataaagtccttctacggcattgcgttcctgataatcagcatcacgaggttcggtatatacatatcctaagttatagaatagttttgtatttttattgaagttgtatacaccgtttgtagagatttcaataccgtagatttgtgctttcgatacattatgaaattgggcaccgattccaaagcctttaccgtctgacaacatctgaatggcatcgccaatactgttgatcatcgtatagttggcattgttgaacaaaccgaactggaattcaaccatgtctttatattgcgtatagaatcctgcaaggtctacaaatccttgcagattgccgactttatatccctgtttgaatcctaattccgcattaaatcccttttccggtttgatgtccaggttaggatagataccgactccaccgatatctttacgcaggtatttttcattgatagacgggttacggtatccctgtccgaagctggcacggataaaactgtaatcagccaattggtaatttaatccggcacggaaaacagggcggaaggggacctttgttccgaatatttttgtttccgcctctcggtgatggttgtttacgcggtagtattcggcacgtacaccggccgatacgctcagacgatcccaaaaacgttggtcatattgcaggaaagcggcgatgttgtcacttttatatatctcatccattacagcagagtcatagcggatatgttcgaatgtaacccccgtagtgatttgcgcaccactgttccattttttattaaattggtagtcgaggtaatagtcgaaattcttgtccgtctgtgttttcggattaatgcgtgacggattaataacattagatagccaaggaacgagatcactgggcaatttgccatcttgtatcagtttgtctaaatcagcgggcagcccgtgatccatagtccatgagattaagtcgcaatagtcggcagttgttgcattcgggaatatatttcctaatgaagtgaatattccattcattgcatcttccaggtttccattgataagtcctgaaccaatgccaattaatgccggataaagtgaactgtaatcacctcctgctatattttgtattgtttgggcatcggttcccatattccctagaatatcggtaatggaggctccgttggtgggtcgtataatgttgtcggcactataatagaagcggcctttaatcttatgtgatgtaccgttctccggattcacatagttgatgaacgggtcgatatggaagttgttttcttcacgtcccatgttggtgaaaggagatggcttgtatacttctgtcggtgaacgccagataaagaaatctccatattggttggacaggaagtcaacattgaatccatagttcaatagtttcatacccatatccggctgatgataggtcaggctcccacccatccggaaacgtttgttgtatccttgttcgcgatatccttcgtcggtgaagaggttaatacctccgctaacgtcgaaattaccgatacggcgggagtgggaaaggtcgaatccttcgtaaataggattgcgtacaccactaagaaggcttccacgcaagataggtttcactgcgtatttatcttctttccaaaagctcttgtcgctccattgatattcatcattttctgcatcaccatatacaccaacgtaagcactgaacctggttttcggggttagtcccggacgggcggtacggatattgataataccattcagtgctgacgaaccatatagtaccgaagaagctccttttatcacttccacttgttctacattttctagaggtacggtgttccaatttatttctccggttttagggttgagtgtactcattccgtctaccagaatttggctacgtgcacctactccgtaggtccatccgctaccaccacgcatggaaggctgtttatctacaatatctactccgggaagtgtacgaagggtagaggagatatctgtcggtgcttggcgggcaatatctcctgatttgactacatccatagagacggtaacatcgctcaacttctgctcaaaacgtcctgcactgaccactacttcttccagtagcttggtgctttctttcatatagacgtctttggtgacaatttcacgtttattgatcacaataggcattagcacatcttcataacctacataactgaaaacaaggtcaactcctccttctggaagtttgatttcatattctccgttgatgttggatactactccctgattgccgtgaagcttataagtgacggctgctcctaccaatggttcattggtctttgcatcgtatatatgtcctttaagggtttgggcaaaactattccccaatccaataagactaattaataaagttaggatatgtagttttttcatttttcttattttttattgctttgtacaagctctaaaccaaattcgattttttggggcgaaaggaaagctttcgaaattccatctaaaaacgcagagattatgcttcctaatgcttgcatatcctctggaagcatactaattactaatggactcaagtctggaagtaatttagctataggagtaaattcttctttatctaaataaatatgagtgtgcccctcttttgaggtaacaagcattggaattcctgtagttaaccaattaaaaagtgctttgaaagaggtatcattgatattgatcagaaatccaagtgtgtcgttgtttagactttgattaagggtagttagtagctctttcaatttcatcggatccatttgagagatagcatcaatgattgcattaattatatttgcatctatatgcttgtcgctagctatttgagaaattatattggctaagtttaattttaatataaacttgtcatttttctgatgccagttggcaaaccctttaggagatggaatgtatttgcgattagcaatatgaggagtgatcatatcttgtgtcagtggaactgagagaaagccaaaaatagtttccatatctagtcctgatagtggttcattagaataggaggctgttatatttccatctgctcttaaagttatatcttgtaaaacttgtggtaagatatagcttaaaatgttttgaattgcattaccccatgtctgagttgtggctccgctttctgaagcttctatgtctgcataaaaatagcatgatgcatttaaaacttgtccatcaacttcttgccatgtatattcatctccccatatatcccccactacaatccttttgataccgttaataactgtaggtagtttgtaggtgtttgcccataactcagcattacccatttgaagattggatatatttaatgttaactgcccttttgtgacacgcccttcgtatctaaaggaggttaaagtgttctctcccattccatttccggaaaaagaatatccttcctcatctccagaaagggggatggataccatttttaattctttctctcccggtaaaatatcataaagagtaacaatagctgtttctccggttacagtactaaagtctacagattttccaatcattgtttctccattataggtaagaattaagtttggattgggatttgacagcttgtttgaataattagctgtcacatctaccggagccggtccgtaatgatcattatcacaagatgtcagtaaactgagcgttatgacaaggaagcttgtcattaaaatagatatctttttcattgttctttctttttgatggttaagattaattattgttgaatagtgagatcgactcctatttccattttgtctaataatgtggtaacttcttttaaatccattttcaataatgacgaaatgatattgacgaacggtgtaagactttctttattgaaatagatataggtatgatcctttgttgtttggctgatttccattggaataccattctttagccatgacattagcatagtgaaagtggcatcgtctacctttaaaatatacgtcagtatttgattgttcagaacagtattgagagcgcttaatgctagcttcaatcgtactggatcagatttgataagtgcttcgccaataccgatgatgagttgattatctatttcttgtccattattttgagtgataagggagatgatggcgggtatgtttaattgtaatacaaatgaattatcatctgtttgattccaataagctaatcctataggggaaggaacataggtacgttgtcgaagcaggcttttaaactctgcgtctgttttatttgcattagcaatctctataatttcatcaaagtttatggaactggtagtataattggcagtaacaagcccatttctctctaacgttaaatctttcaatatataagggaaaagtacgtctaaaacattggttgccatctgttttatttgtaggatgatcggttttatcgactcgctttcttcttttactgttatgtttacataactagctccactattgcgtactgttacttcttcggttgttgtgtgtgagtaggcggggaatacgtatgtattcgcaacagaaccgtaatgagccatcgtcacctcaagcgacaattgcatagctttcggtgtgattttaccgctatatttaacttcagcccctgtttccgtaacgctcgtcccattaaatgtatatgcatctttttctccactttcattcaattgcacatcattgattggagttgtgttttctcccggaattatatcgtttaatgtcagtgttcctgtctcactgtcttccgttttaaagttgactgtttttccagccaatttctctccactgtaggttaggtctaaagtgtatggcttgatatacgaaccatattcctggctgatttctcccggccaaaagagtttgtcgttgtaggttttttcgcaggaaaccaagagtaaagccatacaggcgacataaaatagtttcttagaagttttcattctcttttagttttattagaatattaattaaaactctgcaaaggtcgtttaatgtttattcgctatcaagctccatatttgggattcaatgttctatatttgctattttaatttgtataatctaatgaaatattaaatagatgttctatttattagatatgttgttctattcttaatgtgctataacaaaggtctcaaaagaaaaactatctttgggcaacttaatttcttttggttatgataatagatggtaatcttcctaaatttgatcttcctattgattttatagcggacgatagtattactggtgatatattaaatatgtatagtcgatttccctgtcagataaaagccgggctttttatactttgtacggagggaactgttcgtgccaccataaatttgttggaggtagtcattcgtcgaaatgactttatcactcttcttcctaattcatttatccaaatacatgaagtatcttcggatacccgtgtttgttttgccggattttcttctgagtttgtcgcttcagtgaattatgtcgattcgttgttgggcttattgccaaacatactgaatactccggttgtttctttaccggaagaaattgcaactttgtatcgtaatgcttatagcttattaatcagggcttattctttgcctaatacattggaaaataaagaaatccttcgttctattcttactatcttttttcaaggagtgaaagagttgtatagtcgacaacaaacagtagtgaatgaacctctcaaacgtgaacatgaattatatcggcaatttgttcaaatattaatggcgaattacacaaaagagcatgaagttgctttctatgccgataaatgcggagtgacaccggcacatttctccagtacaattcgaaaggcaagtgggcatagtccgttggtgattattacaggtatgataataatgaatgctaaggcacaattaaagtctacccgtttaccggtgaaagaaatagcattctcgttaggctttaacaatttgtcttttttcaataaatattttcggaagcatgtagggatgactccacaggaatatagagagaagtaattatgaaataaaagaacggtattcctgcacatttgatgtagggataccgttctatatattagttagttatgttttttaatactattttctggcagacttatttgatacccagtttcttggcaatttccttaggaagcgcatccttgtgtactagaatattcatagtcttataagcaacaaaggctttggaggcataccagataccgttatatttgccggcttttccccaagaattctttaccatgaaatattctttccctgtctgatctttggcgattccatagatttgcattccgtggtcatctgttgtttcccagttatcaaaagcagtctgacgcatttcttgagtaatttccatttccggtgatggtttgctactcaattctctgcgtttgtcggcaggagtcatacctgtccaacgggccatgtccgaaccggaaagttcagctcctttgatgatatccggcataacggcggtaccgttgcggctgaacccttgttcactgacatcactaccccatgcaaaagtatatcctttctttacggcattgtccattacagccatcagttcatcgattggcaggttgtatgacagaccgttacgccaattatcctgaacttctacggcaaattgagtatagaacggatgatgagtataagaagtcagtgatacataatcatcgcagttcagaccaagtgattcggcgaaacttttcggcgtatattcttttcctttgtaagtgaacttctcaggacattctcccaaatatgtatcataaatagctgtcagaccgtttttccaaaccggagtcaatttgcttaacttgcctttggctattgcattaatgtatccttcggcaactgcgtccagttcattgtgcaccggtagagtatcgccatacatgatacccggcattacttcttgcggaacgataccgtaattcttaatacaatacatcacatcatagaaacttccacccggtgaaaaagaactgtcgccatgatagcgtacataattcactccacgatcttccatcgttttgtgtactacgaacatttcagaaaggtcatattcaccttttcctagccggagtaattcggactctacgaatccaagagtagagaaactccagcaggtgctcgaacggttctggttcttaatggaagtaatcggattttctttcactgtcgtgaaaacgaagccctcttcgggttttgtgtcttgtgccgtcatgcttaggctgaataagcccaaagcagcgataaggatactctttttcattcttatgacattaatattaaatttgttttggctacaaatataaggattcctcttttgataaccatccgtttgaattaatatgtataaaaaaagaatgaatattagtatattggggtacgaaaataccgctttgctgttacaacaaagcggtataggtagatacatcagatgtgtgctattctttcttttccttatctttggatgttactatgtaatcttctttaatgaattcatcgtagacacgtttcggatggtcgaacggtgcagttccgtttttctgttcgttgaagttgtctcggcggaattgttttaatttcagattgtcttctgcgtactctctaagtttcttaggctcgtttccataaagcgaactttcggtcacatcggaattgagcaaactctctttgggggtaatagtcggcagaagtacttgttccaatagtccacgataggctccgttatattcgcaccatacgatgtcattggttacgaatatgcgataggagtactttgaccatgcggttttgatttcaatggacgtagcataaatctcaatagtggcttctgaaccatacgcctggtcacggatcacaacggtcgtccgaccgctaagttcttccttcacggaagtttgccatttttcggaattcatgatttcttcgatgatttccgggaacttttctttaatttcaaactgtattctcatggtgcttgcctgcgggcaggactttttaagtttttcctccttaaacaattaagctagcctaaagttacatatattgaaccgaaaaaacaagtatctgtttaaatatttgctatttttgcccaacaatcagcctttttgtttgaatttgtcataaatatgcaataaaatacaaaggcttgtttatgcaacatagagtgtgaaaacgagaatgggagtaaggatatgaaagatttgaaagtagatgaatctataggattggtattggaaggcggaggtatgcgcggtgtgtttacttgtggtgtactcgactatctgatggatcacaatattcgttttccttatacgataggagtatcggcaggagcgtgtaatgggttgtcgtatgcttcccgtcaacggggacgtgccaaatacagcaatattgacctgttggagaaatacaactatatcggtttgaagtatttactcaagaagcgtaacattctcgatttcgatttacttttcaatgagttccccgagcatatccttccttacgattatgaaacttattttgcttcatccgagcgttttgtgatggtgactacgaattgcgtgacgggagaggccaactactttgaagagaagaaagataaaaggcgagtgatcgatatcgttcgtgcttccagcagtctgccttttgtttgccctattgcttatgtagacggtataccgatgctcgatggaggaattgtagattccattcccctgcaacgggctattgcggatggttacacacataatgtcgttgtacttacccgtaacagggggtatcggaaagattcgaaggatattcgcattccggcatttgtttatcggaaatatccgaagttacgtgaagcgttgagccgtcgttgtgctgtttataatgaacaattggaaatggtggagcgtatggaagacgaaggaaagattatcgttatccgcccattgaagcctgtggtggtagaccgtattgaaaagaatgtgcgcaaactgacggaattttatgaagagggatacgcatgcgcacaggctttgtctcattatttttctacttttttccccgattaattcgattttaagtctttattaattccttttagtgggatttattaaggggcgctcctttactttgctgaaaaatagtattggagaacttttaatataacatgaaaaacaaaggaatatggtaaaaagatttagttggttgttttttttattgttttcagtaggtataacagccaaaggtggaggcagcaaataaatacgaacgggctatctgtgtgatgtatgacttgagtggtatgaagccgggagaagaagggttgttattaaaagatattgcagaaatcgcacgtcaatattctataaaagatcatgtcaagaatccgtcttatctatatcataatgggaaaccgttggttaccgtatggggagttggatttaatgataaccgacgttatgggctgaaagaggcggagcgtattattgacggtttaaaattgcaaggattcagtgtaatgcttggagtgcctacccaatggcgcgaactgaaaagagatactatcgtagagtttaaaggacagtggtatgccttttatcataatagtgcgctctccaatcatgattggctccgttccatttgtgtagataaattatatcacaatcctgacgggacgattaagctcgtaaaacagacgaaaagtacgccgataacggtacagaaaaagtatccgttccgtaatcctctaactggtggaatgaatgtttgcatggtgttggacgtactaaatatcatgtcacagtatttccgcaggcaataggaatggcagcttcatggaatgatgtgttaatgaaagaagtcgcttcttctatagcagatgaaggacgtgctatttataatgatgcacaaaagagaggggattacagtcaatatcatgctttgacgtattggcccccccaatataaatatcttccgtgatccccgttatctgaaagcttcggcttgtgctaaacattatgctgtgcatagcggtccggaaaagaataggcatagcttcaattccgatgtaaatacttatgatttgtgggatacttatctaccggctttccgcacattggtagtcgatgcaaatgtatccggtgtcatgtgtgcgtataatgcttttaagggacagccttgttgtggaaatgatttgttaatgcagtttatcttgcgtgataagtggaacttcaaaggttatgttacttctgattgtggagctatcgatgacatattcaatcatcataaggcacatccggatgcggctacggcagcagccgatgcagtatttcatgggactgatttggattgcggtcaaagtgcatatctggctttagtaaaagctgcaaaggaactttttcttttccgcttgccagacacttgcctgtttcgtcttgtatttcccaacggagcaatgaaggctgcaagtccgtaccgttttcacggtcgtttaccacataaatgcgtgtaggcagtttctcgccgacatatagattgcgtccccacaactctgcactgaccaatacgggttgcaatgcgcgtttcaaagcgtaataagtaggatacggttcgatgttctgatagtcatacgtttgacggaaccatgtcattagtgcaaagtgcatgatacctgaagcctggtcgttggaaaggcgtaatgtttctgccaattctcccgtgatgaatgcttgcgttttcaggaatgaggcaggatccgcccaatcataagcttcgtagccaatcaaggtataaggattttggtgaatgagttggtaggaacgggtaggatgtccggtttcattgttgggatagcccgtagacattgtcaagcaatccaactcaacccctttgtctgtgaccaggcggaacttgaaatcgtacagattggggtgctgcggtgtccataaacgaggcttcagatcatttacggtgtaagtttccattcgttcttcgcctgcgttgagacgcagtttacgtatggataagccggaataaagtatcgcacctgtttctttgtcgataatatctgtatacagattgaattgtttctttttactgccatagttctttagggtgatatcgaaggtagcgccattcaaagtaggctttatgaaaaacatcctctacctttgcagggtcggtaatactcaatttcaccggttgccagatcccggcaggttcatctccgtaaaaaacgtgtggaatttctttcaggagcgcattgtttcactgtgtagccagatacggatgggagtccaaaagttcggtaaggacatgatgtgacagtcctgatcgtccgtttttggggaaatggctttatctttattgtctagttggtagcccggcatgaaaagccacttgccatccagcgtgatgtcagtgtggcttccggtgagtgctgctagttttacaggtgtgtagtcagcccgttcctgacggcgtttgttctctttctttgtcggagtcgcttttttcagatattccgctatttttacgtttttcaaggcgtcgtctgtcgtcagggttacgacgagatcgtcaaattcagcctctatccatcctccgcctaaagcaacttcgcccgatggaacgaggttcgcattttgtctatcaggtcaatgcggggatgcttctcgtcattaaggaatacccgaatacggttgccgcacacttctgctttcatgcgataccattctcccggtacaggatggaatcctaacgggcggactcccataaattcatctgttcccatatatccggtacgcatcaggtaaaggtcgtcttgcaaccctcctttgacctactacatatcggtcgaatcggttgtaattacggaagctcgcctatatctgcacttgttcggcgtttttaggggcacgggctttgaaggaaaacgagtaatttgtccatttgggattaccgaagagagcgtaggagcctttggaacggaatacattatcggcaatgctgtatgttcctcgacctaccactttcagtgtttctccagtattagagaaatcatttgtccatgtcgtatggttttgcgcctgtatgcctagtcagaagactccgcatgtacaagctaaaaatgctttgctaattctgttcatgatattatgagttaatattaattttatgtaaagataagaggcgacggtaaacattaggataaaatatcacttaatgtgtaattaatatctgattaaattgtacctgctcttgctttttgtagataaattttatatctttatagatttgcgctttgctaaaaagaaatggttgccttataaggtgccatttgtcacactataaagtgccatttgtccctttataaggtgatgatagtcaccttgcaaggtgaccacttctcggttgcataaacgtatcttgtttttcgcactgcaaatctttagtctccgcactgcaaagtcttatgtaataaggagctttggacaaaaaccactgaaaggccctaccgtaaatggaagcttttagacttatcgctaattattcaggtagaggagctttgcggtcggtttgtgtagatccgattgaatatgatcaaaatgataggttgaaagttgtacaaaactggggacagccctatgaagggaaggctccggaagtagatgtatcggagacattggcattggaagctgaacattataatagaggtggcgaacattatggttaccacaagaatccatcggaaggggatatacaggtgggcacggataatggcattacatatcttaaaagtatgaagtccggagaatgggtgcgttattcgattaatgtaaaacagaccgggtcctatgctattacttgtcggatgtgccagcaatgttcgggaggaaaattccgtattgctataaatggagtgtataagacgaacgaaataaagttgaatggttcgggcagtacatggaacgaagcttttatatatcctgtcgaattacaaaagggtgaacaatatattgatttgcgtatccaaggcggagaactggatattgattgtatcaagttaggagaaggatgcagccaagtacccgatatcattcaggcggaagatttcgatgaaggaaagtatcaatttagggaaagttcgaaaggtaattttaaaacttatcggagtgatcagggagtagctatcagtgctaatagcaatatcatccacatcagtaatacttctggaggagattggattcaatatacatttaaggttttgaggccggtctcaaaagttactgtttgcggggcagcagaaaaagatgggaagttcgctttatcctttgatggaggagagcagttgcctcctgttccagcaactaccggaaactggaacacttatagtgattttctagtatcgaatgtacaattgtcggaaggtattcatacgatgaagattcatatgcttaatccaatgaatgttgattcattcgattttcaataaaataaggtctatttttgttgagttctgatataagaatactttgttaccatagaaattatgtcaatgcactcatgtataaagatggggaataccatttgtattttcaatataatccatcaaatagtactctatgcaacatatattacagcctttgaaacattttttttagtcgattgatataaatcaaccgtaatttgcatcatcgataaagataaagttcgtacttttaaattaataacatcaaactaatgctcagtattatgaagaacaaaaaacttctttgcagtgtttgtttcctgtttactttcatgtcagccctctgtgggcaaaacataacagtgaaaggaaacgttacttccaaaacggatggtcagccgattattggcgcttccgtcattgagactatatccacaactaatggaacgattaccgattttgacggtaacttcacgctttctgttcctactaatgctactttaaagatttcgtatatcggttataagcccgtgactgtgaaagcggctgcctctatccaagttttattggaagaagatacgcaaatggtggatgaagtggtggtgacaggttatactactcagcgtaaagccgatttgaccggtgcggtatctgtggtaaaagttgatgaaattcagaaacaaggtgaaaataatccggtaaaagcactccaagggcgtgttcccggtatgaatattactgctgatggtaatccaagtggtacggctactgttcgtattcgtggtatcggtacattgaacaacaacgaccctctttatatcattgatggtgtgccttctaaagcaggtatgcatgaactgaatggaaatgatattgaatctatccaggttctgaaagatgcggcttctgcttctatttatggttcgcgtgccgcaaatggtgttatcatcattactactaaacaaggtaggaaaggacagatcaagattaatttcgacgcttcggtttccgcatctatgtaccagtctaaattagatatgatgaatactgagcaatatgggcgtacattatggcaagccaatgtgaacagtggtaagaatccgaatgctaattctatcggttatcaatatgattggggatataatgctgaaggctatcctgtgttggataacatctatgttcccaaatttattgatgatgccaatacaatagcaacaggtgatacggactggtttgatgaaatcacacgtacaggctttattcaacaatacaatctttcgttgagtaatggaacggaaagaggtaattatttcttttctctgggatattataaaaatgacggtttgattaaatatacaaacttcgaccgtatttctgcacgtattaatagtgattataaggtgatagataatattttgactatcggtgagcatttcactctgaaccgtacgacggaagtccaagctccagggaatatcatgagtgacgccatgattgcccttcccatgattcccgtacatactgtggatggaacgaattggggaggtcccaacagtactatgcccgaccgccaaaatgtggctcgtataatttatgataatcggaacaaccgatatacttattggcgtttgtttggtgatgcatatgtaaacctgaacccggtgaaaggacttaatatccgttccacttttggattggactatgcacagaagtatcaacgtaattttacgcttccttacaacaccggtttcctgaacagtgataaggatgcggttgagatgaaacaggagcatttcaccaaatggatgtggaatgctgtggccacttacgaattggagattggcaaacatcgtggagatgttatggcaggtatggagttgaatcgtgaagacgacataaactttgctgcttaccgtgaaggatttgcgattctgactcccgattatatgtatccttccgcaggagtaggacagttacaggcaagtggcggagcaggtggtttctcactagtttctttcttcggaaaactgaactattcgtatgctgataaatatttactttcatttaccctccgtcgtgacgggtcttcccgttttggtagcaataataaatatgctactttcccttccgtttctttgggatggcgtattagtcaggaggcttttatggaaaaaactaaagatgtgattgacgatttgaaaattcgtgcggcttggggacaaaccggtaatcaggatattgaaaattacgcacgctattctatctacgaatctaaatacggtacaggtaatcctcctacttatggaacttcttatgatattaccggaagtaatggcggtagtttgcttccttccggatttgtgcgtactcagattggaaatgacgatatcaagtgggaaactactacacaaaccaatgtcggtatggatttcagtttgtttaatcagacattgtatggctctgccgaatattactataaaaaaacaacggatattttgataaaaccgtcttacatcggtattcttggagaaggtggcgggcagtggagaaatgccggttcgatggaaaacaagggctttgagtttaatttgggctatcgcaataagacggctttcgggcttagctatgatattaacgcgaacctcggtttgtatcggaacaagattttgtttgtaccgggtgaagtggcttctaccggagatttcggtggtgacggggtgatgaacattatcggtcattctattaatatgagagccggttacattgccgacggtattttcaagtcacaggaagaagtggacaatcataccgatcagaccggaaaaggcgtagggcgtatccgctataaagatttggataataatggtgttattgatactaaggaccagacttggatcggaaatccgaatcctgatttcacgtatggactcaatatctatctggaatataagaactttgatttgactatgttttggcaaggtgtgcagggagtggacgtttacaatgaggtgaagaagaataccgacttctggtcggtaggcgatatgaatgctaatcgtggcatccgtctgttgggagcatggactccgcagaatccgggatcggatattcctgccgtttgtttggaagacttgaataatgaaaagagaatttccagttattatgtagaaaacggttcttatctgaaacttcggaatttacaattaggttatacattgccgacagatatctcgaagaaaataaagatagaacgtttgcgattctatttcagtgcacagaatttgctgaccatcaaaagtaagaactttaccggtatggatccggaaaatccgaatttcggttatccgattcctctcaatcttacattcggtttcaacataggtttttaattcattaaataacgataattatgaaaatcaagaatatatatatatcctctttgctgttagtagcctcgttggtcggtactaccagttgcaatgactttttggaaagagacttacagggaacttctgacgagggacaaacgattagtcccgataatgtggacaatctggtaattgctgcttacgctcacatggtgtccggtgaggatatgaacagccctttcagcctttggccgtatggaaatgtccgtgcagatgatgcttataaaggcggggcaaactccgaagacggttcgcatttccattttctggagattgctacggggatgactactgacaattgggcttttgatgatatctggtatcgtctttattcgggggtggcacgtgccaatgctgctttgaaatctttggatggtatggatgcaaatacttatccgcagaagaatgaacgtatcggtgagatgcgtttcttacgtggtcattatatgtttctgttgaaagtgatgttcaagcatatcgtttatgtagatgaaacgattcctacttcggactataccaagatttctaaccgacagtatactaacgaccaactttggcagaagatagcagatgactttaagtttgcatatgatcatcttcccgatacacaggtggaaaaagggcgtcctacgcaggctgctgcatcggcctatctggcaaaggtgatgctttacaaagcttatcgccagaatgaaaagaatgaagtggtcgaaattaatgaagatgatttgaaagctgtaattacgtatacggataatgctatcatgactgccggaggttttggcctggaagaagattttgcatataattttctgccgcagtatgagaacggaaaggaatctatttgggctgtccaatattcgcaggatgataatacgatgtatggcaacttgaactttggtaatgagttgacagctccgcaattcttcgggtgttgtgattttcagaagcctagccaaaacttggtgaatgctttccgcacggaaaacggtaggccgatgttcgatacttacaatgagaaagataattatgatgtgcaaggcaactacgatccccgtttattccacacggtggcgattccgggatttccttataagtataatgtgaactatatttttgataagacgtggacacgtaacgaacaggaatattatggtctttattcatctttaaaagagaatgtggaccccgattgttcttgcctgaagaaagtgaattctccgtttgttgctaattcgatgaaccgtattgtattgcgttatgcagatgtagtgctgatgcgtgccgaggctttgattcagttgaatcgtttgtcggaagcattgccgttggtcaatgagatacgtaaccgtgcagcccgtagtactacgcttgtttttgattatggggcaagttttaaagtagaaccgtatacaatggccgaatggactgatcgggacattgctatgagagacctgaaatgggaacgtcgtcttgaactggcattggaaggaagccgcttctttgatttagttcgttggggagatgcggcaaaagtgatgaatcaatattatgcgtcggaagctagtcgtcgttcttattattcggatgcaaattttacagcaggaaagaatgaatatctgcctattcctcagaagcagatcaattatagtggtggtttgtatcagcaaaataatggttgggagaaataataaatgggaattatgaagactttgatagataaaatatatatggtgttactggctgcacttttactttctgcagctggatgtagtgatgatgatgacacatcgttggctttgaatggtgatacatggattacttctttccatatcgaagattatgataactttatcattgagcaggataatcaggcgagaagcattaaagtacatgtggaagataatacagatgtgacaaatttaattccggtatttactttgtccgaaggggctacggcgaatttggaaagtggtaaacctgttaactttacaatgcccgtagtggtaaaagtcacaaacggaaatgtatttatgaattatacgatttccgtagaattggataagccgcagattactagatttatgataggagagtatgcgggcagaattgatgaaacaaacaaagaaatcgttgtgtatgtacttgaagacatggatattaccgctttgtctccagttgttactgttcctgatggtgctacggtaagcccgttgtcaggcactacattggatttcactacacctaaagaatatacggttacaaatcatttgaatgcagccacttatacagtgaaggtagaaaaggtaagaacttttgtttcaatggcatttatcggaacagctgcaactattgatgaactgactaataatgaagaaaaagccgctgctcaatggatgttggataatatgccgggagcaaggtatatttcatattcagatttgagggatgataacccgaaagtgaaacttgatccggaacagataaaagtcatttggattcatgatgataatcctatctatgatgataatggatttaattggaattcaaagaataatattaggaattattatcagacaggtggaaatttgttattatctcgtggagctttacgatatatcgtaaaagatcggtgggctatttctatggatggtagagatcctaataatcaatttaggagtgaagattctcagactgttacagaaaaaccttggggcttttcaatagagggtatctctcatgaaatatttgatggcttagtaactgaggataattctaatatttatttaataaatacaggttatcatatttttaattgggtatttcaatggtgtatagattgggaaccttattggggaatagaaggatggagacaacaaactggtgcaatagagttggggtatgatgtttccaatcacaatgcagtgcctatcgctgaattcccttctcgccagataggaggaaatagtagtggaaaggtaatatgtattggcatggcagcttatgattggtatgatgaaaaccaatcagataatcaatatcgtggtaatatcgagaaacttacctctaatgcactcgattacttaagcaagtaaagtataatctgataaagaaaagcaaattatgaaaactatgatattaatggcttcaatactgtgtctgtcaatatcgtttgctgcttgcagcgatgataacagtccggtaatcacagataaaaatctgaatgaaacgacaacattctttagttcgacggaatcgaacaattatacgacttattacaaaccttatgttggttatgtaggtgatccaatgcctttttttgatccggtaagtaaagagtttcgtattctttaccttcaggatgatcgtgacggtaattctactatctatcatcctatccacgaattggcaactacggatgtggcaaactatatctctttccgcgaagcaataccatgcggaacagcagtagaagacgatccggctatcgggacaggaagtactgtttatgatgaggctacgaaaacttattatacttattatacaggacataaagctaccgaacctcgtgaagtaatactgttggctacttccaaagattgtaaaacctggactaaagaccgttcattccgtttatcggctccaatagaagcagggtatgataaaaatgaattccgcgatccatatgttttttatgatgcaactgcgcaatgttataggatgttagtttctgctctgaaaaatggggatggatatatcattgagtttacttctaccaatttgcatgattgggatttaaaaccggaaccgttcttcaataatatttgggggcgtttctatgaatgtccggatgtttttcagatgggaagttattggtatatggtttattcttcacaaggaacaaaaaatgaaccggccgttgtccaatatttctatgcgcagactttggaagaattgaagggaatagctgtagagaatgggcagttccctactttcgtaccccacgaaggatggttagatggagttagtttttatgctggaaaaacagcgggcgatgatacaaatcgttatctttggggatggtgtccgacacgtgaaggacagaaaaccacaggtaccaaaagttgggcaggagcattggtcgctcatagattgattcagaacggagatggaacattaagtttggatgttccacaagcgatttccgccaaatattcccaatcggtgacattggctgaaaagacgaaggtaggggatgtaacggtcaacacttcttcttatacattgaaagcaaattcatttgtccgcttcgcccgtttgagaagccggaacaaaataaccatgactgcaacaatccctgaagagaatgaagccgtattcggactttcatttgtcgattgcagtgataaggcagaaaaggcgcgtattttcattgaagataaatataatttcctgaagttgaaagaagtagaagtaaatgagaaaacaggtgaatggaatgatgcgggtgctataacagaacgtgctataactccggctgctgacaatgtatatcatatagaggtctatactgaagaatctgtgtgcgtagtctatataaatggaaggtatgctttcaccaaccgtatttatgatttggctaaaaatccttgggctattttttgtactgagggtgaagtgactgtatctgatataaaattgagtacttattaattgagaaagtaacatcttttatagcgtttgaaacaaatgtgataggcgctccgatgcattgcgcctatctttgcattgcaacaaccaagaaatatgatactattaataataagtaataaccttaataccataaacatgaatgtatttttacccttgagaaaacttcagactcttctgatttgttccatttttatgaatatctcgcttctggctttagctgcagatccttctcttttaataaaagatttaggagaaggacattgtttggtgcgtgtcaatactactcagaaatacttgttattaccggtagaagatgcatcgcctgacgtacgtatcagtatgattgctgataacaaagaagtgaagagctttgatgtccgtctggctattaacaaggtagattattttgttccggtagacctttccgattattccggtaagttggtttcatttaaattcaaaatgaattcaaatgatccggtacgtgtcaatctttcaccggataacaccgcttgctgtagagaaatgaagttgtccgataccttcgatacaactaatcgtgaaaagttccgtcctgtttatcacttctcacctctttatggatggatgaatgatcccaacggaatggtatataaagacggagaatatcatttgttttatcaacataatccatacggttccaaatggggaaatatgaattggggacatgctatcagtaaagacttaatcaattgggaacatcggcctgatgctataaccccggatgcgtttggcactattttcagtggttcggctgtggtggatcataataatacggctggttttggtgcaggtgctatcatcgctatctatacacagaacggtgatcgtcaggtgcaaagtatcgcttacagtaccgacaatggacgtacttttacaaagtatgcggataatccggtgttggtatctgaagcccgcgatttccgcgatccgaaagtcttttggtatgaagggacaaaacgttggattatggtacttgccgtagggcaggaaatgcagattttctcttctcccaatttgaaaaactggacttttgaaagcagtttcggtaagggacaaggtgctcacggaaatgtttgggaatgtccggatttatttgaacttcccgtggaaggtacgaatgaaaagaaatgggtattgctttgtagtcttggtgacggtcctttcggtgactcggccactcaatactttgtcggaacgttcaacggaaaagaatttgtaaacgaatcaccctccaaaaccaaatggatggactggggaaaagaccattacgccactgttacttggagtgatgctcccgacaaccgtcgcattgctatcgcatggatgagcaactggcaatatgcaaacgatgttcctacctctcaataccgtagcccgaactctgttcctcgcgatttgagcctgttcactgtagatggcgagacttatcttcagtctgctccctctcccgaactgctgaaactgcgtgacgtctccaagaaacgctcgttcaaagtgaacggaacacgtatcatcaaagacatgattgccgacaatgagggtgcatacgaaatagaactgactatcgaaaatcaacatgcggatgtaatcggcctccgtctctacaatgacaaaggcgaagaagtggatatgcaatataacatgacagaaaagaaattctcgatggaccgccgcaaaagcggagatgtaggtttcaatgagaacttcccaatgttgacctggacggctattgagagtggaaaagacgaattgaaactccgtctgtttgtcgacaaatccagtgtggaagcctttggcgatggcggacgttttgtgatgactaatcaggtgttcccgtcggaaccttacactcatatcgacttttacagtaaaggaggagcgtataaagtagattcgtttgtgatttacaagttgaagaaataagctcattctccttactctatgcgctctttacccgcttctttgttttagggtgatgtacattgccctatggaaacagaattcatcgtataaaagataaaataatggaaaacagtaaaaattcttccctctccaaactagtcccggtgatgctttgcttcttcgccatgggatttgttgacctggtaggcattgcctccaattacgtaaaggcggatcttggtctgtcggactcacaggcgaatatctttccgtcattagtattcttctggtttttgatattctctgtacctacaggtatgctgatgagccgcattggtcagaagaaaaccgtattgcttagtttgattgtgactttcgcttctctgttgctacccgtttttggtgacagctatatgctgatgttgatttctttttctttattaggaataggaaatgcgttaatgcagacttccttgaacccgttgctttccaatatcgtacgtggcgaccgtctggcaagtagcctgactttcggtcagtttgtgaaagccattgcttcttttttggctccttacatcgccatgtggggagcgacgcaggtcattccgacttttgatttaggctggcgcgtgttattccctatttatatgattgtagcgatcattgccattctcttgctcaatattactcagattgaagaagaaaaagaggaaggcaaaccgtctactttcggacaatgtctggctttgcttggtaaaccgtttatcctgctttgttttattggtatcatgtgccatgtcggtattgatgtaggtacaaatactaccgctccaaagattctgatggaacgtcttggcatggggctggatgacgctgcttttgctacaagcctttattttatcttccgtacggctggctgcttcttaggatcgtttattttacgcaagatgtcagcaaaatctttctttggcattagtgtggtgatgatgttggtagcgatggccggattgtttgtttttcatgaaaagacaatgatttatgcctgcattgcattgattggttttggtaattccaatgtattctctgttattttctcgcaggcgttactttatcttccggtgaaaaagaatgaggtttccggcttgatgattatgggacttttcggaggaacagtgtttccgttggctatgggagttgcctccgatgcaatggggcagagtggggcggtagccgtaatgacggtgggcgtaatgtatcttttgttttatacgttccgtattagaaaataaattaataactttggaaacaataaaatctgtaagtcatgaataatataattgtaggaatgggcgaagcactttgggatgtgttgcccgaaggaaagaaaattggcggtgctccggcaaactttgcctatcatgtatcgcagtttggctttgacagccgcgtagtaagtgccgtggggaatgatgagctgggagatgagattctgagagtattcaatgaaaagaaactgaaaacacagattgaacgtgtggattatcctaccggtacggtgcaggtaacgttggatgatgagggtgtcccttgttatgaaattaaggaaggggttgcatgggacaatattccttttacagatgaactgaaacgtttggctttgaatacacgtgctgtttgcttcggatcattggcacaacgcaatgaggtgagccgtgctactatcaatcgttttttggatacaatgcctgatatagacgggcaattgaagatttttgatattaatctccgacaggatttttattcaaaagaggttattcgtgagtcctgccagcgttgcaacgtgttgaagataaatgacgaagaattagtgaccattagccgtatgtttggctatccgggtattgacttgcaggataaatgctggattttgttagctaagtataatctgaagatgttgattctgacttgtggtatcaatggaagttacgtatttactccgggagttgtttccttccaagagaccccgagggttcccgtagctgatacggtgggagccggtgactcctttacagcaacgttctgtgcttctattctcaatggtaagtcggttcccgaagctcataaactggctgttgaagcttccgcttatgtatgtacgcaaagcggtgcaatgccggaacttccacaggtactgaaagataggatgttataaaagcctatacgatagaatatataataaaactcccatgagatgaagctcatgggagttttattatgaccttacataagaggtatgggtataaaaaaaggagcaacgccttgctccaacctttgttaaccttaaatctaatactatgaaaaacacagtgcaaagatacggacttctgtgaaactagcaaataatccaaataaaaagagatgttttataacattgattaagtgtttgtctaactctttatacttttattaatgaaatctgactttgttgtgacactgtttgcgggtagaaggaggcttgttaataaagcagatttgaggctttttactttctgtttttaagagaaaaccattatctttatcccgatatatgacaaatagatagtatggtaaaagatataatctacgaaaaaaatacacaatactatgggatatttacgttggatagtgatcttgttttgttttctcggaatggtagcctgccatcaagatgtgccgcatttccgtattggtgtggctcaatgtagtgatgattcttggcggcacaaaatgaatgatgagattcttcgtgaagccatgttttacgatggggtggcggttgaaatccggtcggctggagatgataaccgcaagcaggcggaagatgtccgttattttatggataaaggagttgatttacttattatctcagccaacgaggcggccccgatgactcccgtcgtggaagaagcctatcagaaaggaatccctgtaattttgatagatcggaagattctatctgataaatatactgcatatattggtgccgataattatgaaataggccgtgcggttggaaattatattgcatcaagcttgcagggaaaagggaatgtggtggagcttacagggctggggggggcgacccctgcgatggagcgtcatcagggatttatggcagccatcagtaatttcccggatataaagctgattgataaagcggatgcggcatgggagagtggtccggctgaagtggagatggatagtatgctctgtcgtcatccgaaaatcgatgcggtgtatgcacataatgaccgcatagctccgggagcttatcgggctgccaagaaagtaggtagggagaaagaaatgctctttgtaggtattgatgctttgccgggtaaaggaaacggattggaacttgtgcttgacagtgtgctgaatgctacttttatttatcctacaaatggtgataaggtaatgcagttggctatgaatattcttgaaaaaaagccttatcctagagaaaccgtaatgaatacggctgtcgtagaccacacgaatgctcatgtcatgcaactccagactacgcatatatctgaattggatcagaaaattgaaacattgaacggacgtatcggagggtatttgtcacgtgttgctacccaacaggttgttatgtatggtggtctggttatccttttgttggtggcaggtttgttattagtagtatataaatctcttcgctccaagaatcgcttgaacagagaactttccgaacagaagaaacagttagaggaacagcgtgacaaactggaagggcaacgtgataaattggaagaacagagggatcagcttatacaactttctcatcaattggaagaagcaactcatgctaaattggttttctttacgaatatttctcatgatttccgtactccactgacattagttgccgatccggtggagcatttattggctgataaaacgttgaatggagaccagcatcggatgttgatgttgattcagcggaatgtgaatatccttttgcgtttggtcaatcaaattttggattttcgaaagtatgagaatggtatgatggaatatacacctgttcctgtagatattctttcttcttttgaggggtggaatgagtcgtttcttgcagcagcgcgaaagaaacatattcatttctcttttgataagatggcggatacggattatcatacattggcggacgtggaaaaattggaacgcatttattttaatcttctttctaatgctttcaagtttactccggaaaatggaaaggtgaccgttcgtctgtctcctttgacaaaagaggatgggcgttggattcgttttactgttgctaacaccggttctatgatctctgtggaacacattcggaatattttcgaccgtttttacagaatagatatgcatcatgcaggttcggggattggcttggcacttgtgaaagcttttgtcgaattgcataaaggaactatttctgtagaaagtgatgaaaaacaaggaacaatctttacggttgatttaccgatgcagacttgtgaggtaaccgtttcggtggatagcccattgtcttcttccattggggcttcggtctcttctgcgttaaacaatgctcaagtagctgaggaagaggaacctgaaaaagattatgattcttccaaaccttccgttcttgtcattgacgataatgcagatatccgttcatatgtatatagtttgcttcataccgattatactgttattgaggctgcagatggttcggatgggattcgtaaagctatgaaatatgttccggatttgattatttctgatgtgatgatgccggggattgatggtattgagtgctgtcgtaggttaaaaagcgagttgcagacatgtcatattcctgttattctgttgactgcctgttctttggatgaacaacggattcaaggatatgacggtggtgctgattcatatatttccaaaccttttagttcacaactgttgttggctcgtgtccgtaatttgattgattcgcatcgtcgcttgaagcagttctttggcgacagacatacgttggcgaaagaggatgtttgtgatatggataagaactttgtggagaaattcaagtctttacttgacgcaaagctgggggattctaatctgaatgtggaggatttaggaaaagatatgggactgagccgtgtacaactttatcgtaagataaagtctcttactaattactctcctaatgagttgcttcggattgctcgtctgaagaaagcggcttctctacttgcttcatcggatatgacagtggcagagattggttatgaagtaggtttcagttctccttcttattttacaaaatgttataaagaacagtttggagagagtccgacggacttcttaaaaagaagaggataataagattgcaattggtatgattataataaatcccgataaggtatatttaatactttaccgggatttaggtatgggataggaaaagaattagttatagatcaacagactcttatctgcattaccttgaccgtaccaattttgttcatttttaccgctgcttgttgcccatttccagaatccgggataagctttcaagaagttggctttttcaactgcgtgggctacattacccggtactctcaatccccaaatcagacgttctttgctaaagtagtagttgtcgtcttcttcatctccgtcggattcatatacaggaagtaaattagaatctttgaatggatatttgtaaccaactggctcaatgccattcatgtgtatttctgttccatcatcattacgttttaagtataaatcaaatttatcatcctccaatatttcttctacctctttggcaacattgagatcaattgtaataatgatttccggtaaatcattggttgatactaaagctcctctttcagtattaaaatactgactttcacctttgggaaggtttttgattaattcgctgcaatcaatgataagataattctttttattatcaacgtatttaacctcgagtggctttcttgttttagcatttatcatttcaacttcagcttcgtgcttttttatttctttgagttttaaataaggagaatatgggaatattccgccaacagcttttaagcgtaagccgataacaatctgcttacttttataatcatttcctttttgttttccgacttcaaattgtaccttgtaatttactacaaagtcattgaagtcataatctcccaatgatggaaattgatcttcaaacataattgttccccaaccattcttaggatgatatattactccttcccatttgtcgtaatcaatgtcatcttctatgtcaactgctcgagatgtggtattgttattatcattgatggataatgagaaactgccatcagggttgattggcattgttgctttgatcatagcacctgaaccatttttatattgagcatacaatgtttttgcatatgtaggaatacttaatggtaggcttgaagtttctgcgtatacagggatagttgctagtttttcttcttcactgcatgcttcatccaaaaagaatgaaactattgtaggagtagggattgtagatgacaccgttgtctcacttacttgagttaatttccattggaaatccgcaggtatatccaagtctttcatttggagttccttttcaggctgtttgctttcatcataaagattcttctcacaggaactgaaagctaaggttcctaacaaacaagaagcaaatagaacagtcttctttttcataatgatgttgcttgtctcgttaataataaaactacttttatgccacaaaggtcataataatttgtatataaagcaagtaaagttgcatatattgtttgttgtatcttaataatttgcaaatattcgtctttttacctagctttgaggaagaaaaataagtaaaagagaaggtttaatgaaggattataaagtagacaaggcaaagttttctgcgtctttttgtcaagaggtgcatcaggttgtttgtgatattccggtaggaaaggtttctacttatggagagattgccacattattaggaatgcctcaatgttcccgtatggtaggacgcgctttgaaacaagtaccggagggtatatctgttccttgccatcgagtagtcaatgcatcggggcgccttgtacctggctggacagagcaaaagcaactcttgctgaaagaagggatttctttcaaacaaaatggatgcgtagacttgaaaaaacatctttggaattactctgcttctgaataaaatttgcatttttaatctattttccttatctttgtgccaacaatatgcaagaacagactgttatttatttatgaaaatactgtttttttactgttcattgagaggataatcttatcaaattctattccttttaaactactcagtctgttttttaatcatttaaaaaactcattggatcgtcatgttaccatgttaccatgtgacatgactgaaccatgcgaacattcaacttgtttatcgtaagtgagaatgaggaacgcggcagttgaaaacaaaacaaatattataatctaaaccaatatattatatgagtaaaatagaaataaaggatttgtaccttatctttggtcatgagaagcagaaagcactcaagatgctgaaaaaagataagagtaaagcggaaattctgaaagataccggttgtacggtaggagtgaaagatgccaatctttcaataaatgaaggggagttttttgtgataatggggctctcgggaagtggaaaatcgacattactgcgttgtattaatcgtttgatacgtcctactgccggacaagtccttgtaaatggagtcgatatatctaaaatatccgaaaaagaactattgcaggttcgccggaaagagctggcaatggttttccagaatttcggtctgttgcctcaccgttccgtattgagcaatatcgcattcggccttgaacttcagggagtgaagaagggagagcgtgaaaagaaagcgatggaaagtatgaagcttgtcggactgaaaggatatgagaatcagatggtaggtgaactttccggtggaatgcaacagcgtgtcggattggcacgtgccttggccaataatcccgaagtacttttaatggatgaggctttctctgctctcgatcctctgattcgcgtacagatgcaggatgagctactggccctacaatcaaagatgaaaaagacaattgtctttattactcatgatttgagtgaagcaattaaactaggtgaccgtattgcgattatgaaagacggagaagtggtgcaggtaggtacttcggaggaaatcctgaccgaaccggctaacgattatgtagcccgttttgttgaaaacgtggataggagcaaaattattaccgcttcttctttaatgattgacaaaccgttggtggctcgtctgaagaaagaaggccccgaagttttgattcgtaagatgcgtgcaaagaatataaccgtattacctgtaatagatgccgacgataaactggtcggggaggtgcacctgaacgatttgcttaaattacgtagcaggcaggaaaaatccattgaaacagttgtgcgtacagaagtacattctgtgttggaggatacagtgttggaggatatgcttcctttaatgacaaagagcaattcaccggtatgggtgatagatgagacacgcgagtttttggggacaatcccactttcatctttaatcattgaagtgaccggaaaagataaagaagaaataaacgaaataattcaaaacgcaatagatttatgataaatataggacaatatatagaggtggccatcaattggacgatggtacatctttccactttctttgatgccgtgaatgcaggcatcggtagttttattatagggtttcagcacatacttttcggaatacctttttatataaccattttggtacttgctgcacttgcatggatgaaagcagggcgtggtacggcaattttcactgcattaggattattattgatctatggaatgggattttgggaagctacaatgcaaaccctagctctcgttttatcatctacctgtctggctctaattgttggtgtacctttgggggtatggacggcaaacagtccgcgtgcagagaaaatactccgtcctgttctcgacttgatgcagacgatgcctgcttttgtttatctgattcctgccgttttgtttttcggattgggagcagtgcctggagtgtttgccaccattatctttgctatgcctcctgtagtccgccttaccggattgggaatccgacaggttcctaaaaatgtagtggaagcttctcgttcgtttggagctacccgttggcaactgctatataaagtacagcttcctttggcactgcccaccatcctgaccggtgtaaaccagacaataatgatgtcactttctatggttgtaatcgctgcaatgattgctgccggtggtttgggggaaattgtattgaaaggtatcacccagatgaagatcggacttggatttgaaggtggtatagcggtagttattttagctatcatcttagaccgtatcacacaaggaatggcaggaagaaaaaataagaagggttaaaattgcaagaactaaaataagaaagacagaaaacagaaaggaataaaaatgagaatatataaattagtaggaatcgtactgactgctctgcttttgctggcttcctgtgcagattccgacccagataagaaaaaagtaaaaatagcctatgccaattggttggaaggaatagccatgagccatttggcaaaagtggtactggaagaacaaggatacgaggttgaactacagaatgctgatcttgcccctattttcgtatccatatctggaaagaattcagatgtctttctagatgcctggttaccgataacgatgaaagattatatggatcagtacggtgatagcatcgaatttttaggagaagtatatggagaagcacgcgtcgggctagccgtgcctcaatatgttgccattaattccattgatgaactggctgccaataaagatcggttttcttctgagatagtgggaattgatgccggagcaggtattatgaagactacggacaaggccatctcaacttacggtcttgacggctataccctcatgacttcaagtagctcaaccatgttggcatctttgaaaaaagcgatggataggggagaatggattgtcattacaggttggacaccgcattggatgttcgatcagtttgacctgaaattcctggatgatccgaaaaaagtatatggagatctggaagaaatacatgccattgcctggaaaggtttcagtaaaaaagatccgtttgccgctgaatttttcgctaatatcaaattaacgacagaagaacttagctcttttatgacagctatgaaagacgctcgaatggatgaagaagagattgcacgcaaatggcgggatgaacatcggcagttggtggatagctggataccgaagtctgacaacttcgaaattagttcataaccggtattataaaaatcggtcttatataaaactggcttggacataaaaaagggagtcatgcggttgagcagactccctttttatatttatttgagtgtgattaattattcagcaccccagttctctttagccagacgtttgtagctgttgtaacgccatttagcgtttgcttcagcagctttaaacagttcttctgcttcgttaggatattgtttcattacagaagcgtaacgaacctcacccttcaagaaaccttggaagtcttcccaattcggttctttgctatccaattggaacggattcttgccttcttcttccaaagcagggttgtaacgccacaagtgccagtaaccgcacttaacagccttttcttcttcttcctggctcttacccataccagctttcagaccgtggttgatacacggagcataagcgataatcaaagatggtcccggatatgcttctgcttcacggatagctttcagagtctgagcttggtcagcacccatcgcaatctgagcaacatatacataaccgtaagtagtagccatcagaccgaggtctttcttacgtacgcgcttacctgcagcagcaaacttagcgatagcgcctaccggagtagccttagaagactgaccgccagtgttggagtaaacttcagtatccagaacgaggatgttaacgtccttaccggaagcgattacatggtcaagaccaccgtaaccgatatcgtaagaagcaccgtcaccaccgataatccattggctgcgttttacaagatattgttgcagttcagcgatttgcttgcagtgattgcatttatccttgttagcttcaaccatcgggatgatcttagctgccaattccttagtcttgtctgcatctaacatattgttgatccattcagcgaacaattctttagcttcagcaggagtacagtcagcagcaatagcttcgttcattactttcacgatacgtgcacgcatcttttcgtttgccaattccatacccagaccgaattcgcagaagtcttcgaacagtgagttagcccaagcaggaccgtgtccgttttcgttctttgtataaggtgtagaaggaacagaaccggaatagatagaagaacatccggtagcgttagcaaccatttcacggtcaccgaacaattgagagatcaattttacgtacggagtttcaccacaaccggagcaagcacctgagaactcaaacaacggagtagcgaactgagagttcttcacgttggctttgatgtcaacaagatgttgtttagtcttcacgttgtcaacgcaataagtccagttttcagcttcagccaactgactttcaaggtgtttcattgtcaatgccttgccacccttcttcggattacccggacagatgtcagcacagttaccgcaacccagacagtcgagaacgtcaacctgaatacggaatgtcataccgtcgaatactttacctacggctttcagttgttcgaacttagcacccttctgttcttcagcatcgagtacgaacggacggatagaagcgtgaggacaaacatatgcacacttattacactgtatacagttttcaggattccattctggaacgaatgcagctacaccacgtttttcatatttagcagtaccttgataccaagtaccgtcttcgatacccttgaatgcagatactggcaacaagtcaccgtcttgtgcattgatcggacgaactacttcgttgatgaatgcaggatcgttgttttcaactttagcgtcatccggcaggttagcccaagcaggatcaacagtcaaagtcttgtattcaccaccgcggtcaacggcagcatagttcttgttaacaacgtcttcacccttcttgccgtaagacttaacgatgaatttcttcatctgttcaacagcttgttcaacaggaataacgcctgtgatacggaagaatgcagattgaaggatagtgttggtacggttacccaaaccaatttccaatgcaatctgagttgcgttgatatagtatacggaaatattgttctgtgcgaaatatttcttcaccttgttaggcagattcttagccagttcttcaccttcccagatagtgttcagcaagaaagaaccgttcttacgcaaaccgcgagttacatcgtacatgtgcaggtaagcctgaacgtgacaagcaacgaagttcggagtgttaaccaaataagtggaacggatcggagtatcaccgaaacgcaagtgagaacaagtgaaaccacctgacttcttagagtcgtatgagaagtaagcctgacagtgtttgtcagtgttatcaccgataattttcacagagttcttgttagcacctaccgtaccgtcagcacccagaccgtagaatttagcttcaaacataccttcaccgcccaatgcgatttcttcttcttgcggaagagaagtgaaagtaacgtcatctacgataccgatagtgaagtggttcttcggcattggcatagccaagtttttgaatactgcgatgatctgtgcaggagtagtatcttttgaccccagaccgtagcgaccgccaacgataacaggagcattttcaacaccatagaagcaatctttaacgtcaagataaagaggttcaccgttagcacccggttcttttgtacggtcaagaactgcgatagtcttagcagtcttaggtacagcagccaagaagtgtttagcagagaacggacgatacaagtgtacggcaaccaaacctactttctcaccgtttgctaccaagtagtcgatagcttcgcgggcagcttctgttacagaacccatagcgataattacgcgttctgcatcttcagcaccgtagtagtcgaacaaaccatatttgcggcctgtaatcttagaaatttcattcatgtattcttctacgatagcaggaactgcttcatagtagttgttgcatgattcacgatgttggaagaagtggtcagggttttcagccataccacgagcaaccggattcatcggattcagtgcacgggcacggaattcagccaaagcttcctggtcgatcagcggagccaagtcctcattttccaacatttcgatcttctggatttcgtgagaagtacggaaaccatcgaagaagttcatgaacggaacgcgtgatttgatagtagccaagtgggcaacaccggccaaatccataacttcctgtacggaaccttcagccaacatagcgaagccagtctgacgagctgacattacgtcttggtggtcaccgaagatacacaatgcgtgagaagccaatgtacgagcagatacatggaatacgcaaggcaagaactcaccggcaattttgtacatattagggatcatcaggagaagaccctgagaagcagtgtaagtagtagtcaacgcaccagcctggagagaaccgtgaactgcaccggcagcaccgccttcagattgcatttcctgtaccaatactgtttcgccgaagatatttttacgtcctgcggcagcccattcgtctacgtactcagccatagtcgaagaaggagtgatggggtagatagcagctacttcagagaacatatacgagatatgtgctgcagcctggttaccatcacaagtgatgaatttcttctgtttagtcataactaaattaaatatttaagtaaataaatcttttaatataaaaagccgaacatccagagaggtatctgattgccccgacctatttctgccttatgcaacgcatacgtcgcattcgggttattcttaatctttgcaccttccaggcaaatcttgaacggcatcacttcgtctacgataaaagagaaattcttgtctcctttgtgtatcttatggtccttccataaagagtttgcaaagaaagtgtccaatacatcctgttcttctactttcaccgggtagatggaatacatcaagttggagttgtgcatcattatcttcgaaggttttttcggaaattcttcccctttcggataaaccagattaatgagtcgtgcgtccgccagatacttgatgtaattcatcaccgtagcgcgggatgtttgtatgtcgcttgccaactggctgacatttggagccttcggtccgtcgacagcgagcaaatatagtaatttttttatctttgaaagatatttcagttctatttgtttgagaagtaggatatccacttccaccatcatgttcattgtctttagcagattctccgaaaagttgcgcttttcgaggaagaacggatagaatccgtgatgtaggtaatcctgaaaataatccaacggacgtaccttggaaagcactcctttggcaatctgttcatgcgtgcttagaatctcttcgaggctgtaagcccgaaacttcataccggtctgcaagttcaagaattcacggaaagaaaatccgcgcaggttgtagctttttgcaatatcgcgcaattcaaggttttcttccttcagccgcatcacggacgaaccggtaaagactatcttcagattgggaaagcggtcgtaacacatacgtaactccttgctccattccgggtgcttgaacacttggtcgatgagtagtacttttccaccgcgtttttgaaattcgttggcaaagtccacaatgctgtgtcccgagaagtagaagttgttcatgttgatgaacagacaagagcggtcggtcccgaatttctcttttgcgtattggagcaggaaagtggtttttcctacgccacgtgtccctttgataccaatcaagcggtcgctccaatcaatctcatccataaggtcacggcgaacgggggcattggtgtgctcaacaaggtaggcgtgtgtgcgatagaatgcttccatttctgttcttagttttacgggtggcaaatatagtgctttttttaagatttgcaaagtagagatggcaaaattgtgcttttaactctaactttcttcttattattaggtattgctgactatttcctgtatatatttgcagaataaagttttgaattcgtttgagatggctaaaaagactctttatctattcaacccggaacatgacttggcgttggctagcggtgaaatcaattatatgccaccggcctccgcccggcagatggcgaccgagctggccttgctgccggtgtggtatgccgaagaggggagtgcggtattggctccttccgcttataatcttgactatatgaaaaggatgcagcaattgttgggactttcggtacatctgatgacagaaccggaacttgcttccgaacgaaacctggatatccgtccttggggatgggacatcgccgtaagaaaacgtctcttggacttaggaatagagaagcacgcattaccctctattgaacaattaaataaattacgttcttgttcacaccgttcctgtgcagtagagttgttgcctcatctgcaattggacaattatttttgcggtgaatccttctacctgacacttcccgaagaatggaaatcatttgttgaatctcatgatacctgtctgctgaaagcacctctttcgggtagcggtaagggattgaactggtgtaaaggcatttatacgccttcaatttccggttggtgtttgcgtatcggaagtcagcagggtggcgtaatcggtgaacctgtatataataaggtagaagactttgctatggaatttcattcttcaggtgacggacggttcaatttcatcggatactctcaatttcgtacgggtgggagtggagcgtatgagggtaatcggttgatttcaaatgctgcgattgaacggaatctttcggaatatgtccccgttggggagcttgataaattgcgtaattgtcttgaacgggaattatctcttcgctttggaagtgtttacaatggctatttgggagttgatatgatgatttgccgcttcccggaatctccggcttatcgtattcatccttgtgtggaaataaacttacggatgaatatgggagtagtagcgcgtcacttgtatgaccgttatatatgtcctttctcaacagggatttttcagatagactatgccccttcggatggagcagcatggaacgcacacacagcaatggcagagacttatccattgaaaatggagcagggaagaatctgctctggttatttgccattagtgccggtttataaaaaaagtaagtatcgtgcgtggattcttgtgtcagaaagtgtacattgtgtaatatgaaacggtagccgttattccgtttcttatacaaagtcttttacttttgcaccgctctactttcatttccgtaacggtcaatggccgtaacagcaaaatgtttctttgcattccagggtaggataggagcatagatataacttgtctcccgaataccttgtgcaacaatgttttccggtcgattaatgtctaccggaaaatcattcgatgcataaatgatatacattggcttattgcgtgcatcattgtcggtggcagcctgccactttaattccgtataaccattgtcaatatcggttactgtcaattcggacggggccgtaggcggaacactatctagccaaggcatgggaggctgtaaagcaggataagcataaaagttttcgaccaactcatcatagataccctgtgtgttctccataagatatttcacccggtaatgtccctcgcctgccatcttatgattgcggatgaagtttatctggcggtctatctcgtcacgcgtccatttcccttcatcgggatggaggaagtaaatgcccaagcccggaatcacctgccgtccgttactttgttcttgccaatcgagggcaaaaggataaaaattatttccctggaaatacatcatcggataaatctgatccataacaccttctcccatccatccttgcggatcttggtaaacggtaaagaaagcattccaaccacgcgaaggataacgagaagtatcccgatatttgccaacggggctggtacttacttttacccaaggttttattgcttttacacctttatatatataacgtacaatctcggaaatattatcccggcgccattggtcgagcgtacgtcctttgccatatttgcggaaatcatatttatccgggaaaaaaggtgcattctctggataacgtaaatagtcgaaatgtacgccgtccacatcataaccgcttacgacttcgcgtaccagtttcatcaaatactctttcgttgccggatgtcccggattgaggaaatattcacttttgtaagggacgcagatttctttcatccgcttggtgacggacctacttccgagtgaagtaacatgtttcttgtttcccagcggaacggttaccatccacgcatgacattccattccccgcttatgacattcctcaatggcgaaagccagtggatcatagccgggatttcctcctgtctttccggtcaggattgaattgaacggttcgattgctgaagtatatagtacgtctcctcgtgtacgggtttggaataaaacagtattgaaattagccgctttcaatttatcaaggatatctgtcaattcttctttctgtttgtggattgtctgcggagtcgttgcacgtgtgcgaggccagtccaaaccgtatacagccgttacccatgctgcacgaacttcgtgcttgggctgcgcacttgtcgggaggaaaggaaacaaaagtgaaagaatgaaaataaataggcgcatatcctttgttttttgttttaaatctctgcaaagttagtaaaagtgtcggtattgttgggctgtttcatgagattatgttacatttgccaagttaaaaagcgacacactatgattacatttactctatgcctgcttgtgttgatagtaggctattttacgtacggacgccttatggaacgcgtctttggtcctgatgaccgtaaaacaccggcacttactaaggctgatggagtagactatattccattgcccacttggaagattttcatgattcaatttcttaatattgcgggactaggtccaattttcggtgcaatcatgggagcgaagttcggaacttcttcttatttgtggattgtgctggggagtatctttgcgggtgctgtccatgattattttgccggaatgctttctttgcgcaatggtggtgaaagcttgcccgaaatcataggccgttatttagggattactacgaagcaggtaatgagaggattcaccgttattttgatgattctggtcggtgcggtttttgtggccggtcctgccggactgctggcgaaacttacaccggaacatttggatactacgttttggattgtcgttgtgtttgcttactatattctggcgactttgcttccggtagataagattatcggtaaaatttatcctctgttcgcagtcgcactgctgtttatggcggtaggaattttagtaatgctttatgtcaatcatcccgttttaccggagctgtgggatggtttgcaaaatacaaatcccgaagcaagcaaactccctattttcccgattatgtttgtgagtattgcttgtggcgcgatttccggttttcatgctactcaaagtcctttgatggcgcgttgtatgacttcggaacgtcacggtcgtccggtgttctatggggcgatgattactgaaggtatcgttgctcttatctgggctgctgcggctacttactttttccataagaatgggatggaagaaagtaatgcttctgttattgtagacgccatcacgaaggagtggttgggaacaatcggagggatacttgccattctgggagtgattgcagctccgattacgtcgggagatacggctttccgttcggcacgtctgattgtggcggatttcttgggaatggaacaaaaaagtatgcgtcgccgtttatacatttgtatccctatgtttgtggtagctatcggtctgctcctgtacagtttacgtgatgccaacgggtttaatatgatatggcgttattttgcttgggctaaccagacattagctgtgttcactttgtgggctataacggtatttctggctgtgtccaagaaaccttacatcatcactttgataccggcactgtttatgacaagtgtatgttctacttatatatgtattgctcccgaagggttaggactttcatctgtggtttcttacagcgttggcatagcgtgtgtagtgattgcggttgtatggttctatgcttggctgggtaaacagaaaacaagaaaattatcagaatgaggaaaataaagagatcaacaggagttgcgttagcattccttatttatgtatcagtaactgcggcttatttgttgccacgtaatacggaagtcagccagacagagaaaatcctgacagtggcaggttcttatgtcattgtctttctcctttggctggtgcttcgtaaaaaggagcaaatgcgtgaacgccgtaaaaaagacgaacaatctattcactttaaaaagtaagtttatgaagaaattagctttagctttttgcctattggcagtctcgtttactgcacaggctcaatttgaaaaaggtactatgattcttaatccttccgtcacaggattggacttttcgtatagcaagaatgacgatgcgaagtttggcttgggagcacaggtcggtacattcttggcggatggctttgcgctgatggtcaatgcgggagcagactggtcgcagcctaaagatacgtatactcttggtaccggagttcgttgttatttcaatactacaggcatttatatcggtggtggtcttgattgggaacgtatccgtctgaaaggtggtgagcataataacgattggggggtaggtattgaagccggatatgcttatttcctttcccggacggtgactatcgaacctgccgtttattacaaatggcgttttgatgactccgacaactcacgtttcggcatcaaggtaggattcggattctacttttaaagataatcttcgtcacctatcatcgtatgtgtgaatccaattgtccatcggtgtttctgaacggtgataggttgaccgttgatatctgactacttaactatccgcattcatctcacacaaaaaaagttttgtgcagttttactgtcatactgtcataaatagtctgtatccctttattcatcggtgtttcaaccatgatagcgagtatgagggtaggcatgagagtaactttttactatcatactgcttccataaagcatagtttcactattggtttcaaactggaatacaattagtttcaggcagtagaaactttagtttcaagccgaagaaactctggtttcaagcaagggaaactaaagtttcaagccgttgaaactaaagttccaacggtcgaaacactagttctcgctgttggaaactgtaaagcattgtggtgtaaagcataaagtgtgtgggtattgtatctctgcgtgacggtatgattgccgtcacagtgttgtcacttgctgttgtcacgtcattatcatttaataatcagattattaagtgataatctgtgacaggtgacagcaaatctttcttttaatttattgtagaggagaccgaattcgttaactgagcttttctttcaagaactgtcccgtatagctggctccacaagcggctacctcttcgggagtccctactgctacgatatttcctcccttatcaccgccctcagggccgagatcaattacataatcagcacatttgatgacatccatgttgtgttcgatgattacaatactatgtccgcgacgaatcagtgcgtcaaaggcgtccaatagtttccggatatcatggaaatgtaggcctgtagtcggttcgtcaaagataaacagggtagggtccgctttttcctggcttagatagaaagccagtttcacgcgttggttctcaccgccggaaagagtggatgaggactgtcccaatttgatatatcccaatccgacatcctgtaatggaagtaacttctttactattttcttctgtccgtgttcgttgaaaaactcaatagcttggttcacggtcatctccaatacatcatagatacttttatcatggaacttcacttccagcgtgtcggacttgaaacgttttccgtgacaggattcgcattccaacactaagtctgccataaattgcatttccacagtgatggttccatcccccttgcactcttcgcaacggcccccctcactattgaaactgaagaatccggctgtgtagcccatttgtttggctagcggctgctcggcccagagcttgcggatttcatcgtaagccttgatataagtcacggggttggaacgggaggatttgccgatcggattctgatctacaaactctacattccgtaggtcgcgcaaactgcccccgatagatgagaactctcccggacggtcactgcattcatctaattcacgtttcagtgcccgatagaaaatatcccggacgagcgtactcttaccggaaccggaaactccggtgactaccgtcatcacattgagtgggaaacgtacgtttacacctttcaggttattctcgcgtgctcctttcaactcgatgtagttattccacggacggcggtgtgcggggactgggatttcttcttctcccaagaggtagcgtaccgtgtggctgttgcttcttttctttaggtctttcatatccccttgataaacgacttcgccccccaaacgcccggcattaggaccgatgtcgataatgtagtctgcggtacggatgatttcttcatcatgttcgacgaccactaccgtattgcctaactgttgtagctggcgcagtacataaatcaaacggccggtgtcacgactgtgtaatcctatacttggctcgtcgaggatataaaggctgcctaccagactgctgcccaatgaagttgccaggttgatgcgctggctttctcctcccgataaagagttgctgagacgattcaaggtaagatatcccaaccctacgtcaataagaaaacggatgcggctgttgatttcgacaaggattcgtcgtgccacattgctgtcgtgctcgctaagttttaagttatcaaagaattgcttgagttcagtgatgggcaaatccaccaattcggaaatgttctttccgcctacccgtacataaccggcttcgggcttcaggcgtgtgccgtgacattgcggacagagcgtcttgccgcgataacgtgcaagcattacccgatattgtattttgtactggttttcttccagcattttgaagaaatcattaatgccatgaaagtattggttaccttcccagagtatccggcgttgctcgtccgtcaactcataataaggtgtgaaaatcggaaaatcaaacttatccgcattatgaatcagttcttctttccattcgcccattttctcaccgcgccagcatacgatagctccctcataaactgataaagagcgatcaggcacgaccaaatgctcgtcaatgccgatgacttttccgaatccttcgcaggtggggcaagcaccgataggagagttgaatgagaacatttggtcgttcggctcttcaaaagtgatgccgtctgcttcgaatttagtactgaaagtatgtagtttcgtagttccgtctgccggataaaaacgtagcagacaagttccgtcgccttcgtacatcgctgtttcggcagagtctgtcagtcggctgatggagtctttgctattgcctactgtcatgcggtctaccagcagataaacttcgtcacctgccacaggggtatattcatctatacgtttcatctcaccgttcacttcgatacggttgaatccctgtttcaggtctatttccaattgttgttgcaaggtgcggtcctcacgcagacggatgggtgtcaatacggtgtatctcgtcccttccggatacgtaagcatacagttgacgatatcttctgtcgaatgtttcttcacctcttgtccgctaatgggactgaatgtctttcctacgcgtgaatagagcaagcgaagatattcgtaaatctcggtcgaagtacctaccgtagagcgtgggttgcggctgttcactttctgttcgatggcaatggcgggtgggatgcctttgataaagtcgcattccggtttgctcattcgtcccaagaactgacgggcatagctgctcaggctttccacatagcggcgttgcccctctgcatagagagtgtcaaaagcgagggaagatttaccggaacccgataatccggtgattacaacaagtttgttgcggggtatatctacatcgatgtttttaaggttgttgactcgtgcacctttgatcgaaatatagttgttttctgacataaaatactccttttttatggtagtcggcaaagttagcgaatttatcgggagtttgtattatctttgcgtcacattattacgatttaagaatattatgaagctgaaaaactatcttttacttttcgctcttcttctggtggtaggagtgagggcacaagtgccatccggcaataaatatcccaaacgtgaatttcgtggagcgtggatacaagctgtcaacgggcagttcaaaggtatccctaccgggaagctgaaacaaacgttgattgatcaattgaattctcttcaaggggcaggtatcaatgccattattttccaggtgcgtcccgaagcggatgcgttgtatgcttcgcagcatgaaccgtggagccgtttcctgacagggacgcaggggcagataccttctcctatgtgggacccgatgcaatttatgattgaagagtgccggaaacggaatatggagtttcatgcctggatcaatccttaccgggtgaagacttcgctgaaaaatcagttggcgccggaacatatttatcatcaacatccggaatggtttgttacgtatggcgatcagctgtatttcgatccggcacttcctgaaagtcgggactatatttgcaaaatcgtgaccgatatcgtgtcccgttatgatgtggatgctatccacatggacgattatttctatccttatcccgtgaaaggaatggactttccggatgatgcgagctttgcccgttatggcggtggttttacgaataaggccgattggcgtcgtagtaatgtcaatgtgctgattaaaaagcttcatgagacaatccgtgccgtaaagccgtgggtgaagtttggtatcagtcctttcggcatttaccgtaatcagaagagtgatccgttgggcagtgataccaatggtttgcagaattatgatgacctgtatgccgatgtgttgctttgggcgcgtgaaggatggattgattataatattccacagatttattgggaaataggacataaggctgccgactatgagactttagtgaaatggtgggctacgcattcggagaaccgtccgttatttatcggtcagtcggtatcgaatacgatccaacatgctgatccaaagaatccttccatcaatcagctcccgcgaaaaatggccttacaacgtgcttatcagacgattggcggcagttgtcaatggtatgcttcagccgttgttgaaaatcaaggccgataccgtgatgctttagtgagcgagtatcataaatatccagctttgattcccgtcttcgattttatggacaataaggctccgggcaaagtacgcaaaatgaagaaggtgtggacagaagacggctatgttcttttctggactgccccgaaagcggaaacggaaatggataaagcggtgcggtatgtggtttaccgctttagcggaaaagagaaggtgaaccttgacgatccttctcatattgtagctatcaccagtaatcctttctacagacttccatacgagacgggaaaaacaaaacatcgctatgtggtaacggctttggaccgtcttcataatgaatcgaagtccgtaagtaaaaaggtaaagctttaatagagcagcaatcctgcaataccgcaagcgataatcatcagaatcggattggccttatattttctcgttccgataaaagcaatcaggaagatgatgatactgatagcaaatgtataggtatcttttgtaggtgagccaaagttctctacattcattaataccaatgcggcagaggccagcagtcctacgactgctggccgtagtccgttgaagattgattccactactggatgtttctgatatttcagaaaaaatctgctgatagtcagcattaagataaaggagggaaggactacggcgaaggttgcaatgatagaaccccagatactgcctgtagaagtgaatcccacataagtagcggcgttaattccgataggtcccggtgtcatttggctgatcgcgacaatatctgtgaattcttgcgaacttacccatccataacgggtaacgacttccccttgaatcatggaaagcattgcatatcctcctccgaaaccgaagagtccgatcttgaaaaacgtataaaacaactgaatatatatcatctctttttatttagaacaaataataaatagtacatagtactggcctcttactctcaactctcaactttcaactctcaacttctttaacctttccccaaaggaagcctcctacacctgcagctatgataatccagatgggagagaagcccaatagccagataagtagtgccgatacaaccggaatccacagattgtaacgattgatttttgcagaccgccccatagtaaacgtaggtgcggcgataagcgccactactgccggacggattcctttgaatatccgttccactatcggattatctttgaagttgtggaaaaacagggcgatggccaatatgataatgaaagatggcagaatcgttcccagtgccgtaacaatacttccccgtataccgcgcaatttgtatcctataaagatggatatgttgactgccaaaatgccaggagcggattgagagatggccagcaggtcgatgaagtcgtcctgtgcaatccatttccgtttggttacgatttcattttcaatcaatggcaccatcgcgtatcctcctccgatggtgaaggcgcctattttaaaaaagattccaaatgattcgagatatatgttcattcttctttttctcctccttccttgttgtcttcttttttctccttaaagtattggctgggactcacgttatagtgtttcttgaatacttcacggaaatacttgacatcattgaatcctgtcatttcggatatttcagttatattatgtacattttcttttaataactttatggcatgtttcaggcgaatcagccggatgtagtcacccggtgactggtcggtaagcgctttcaacttgttataaaaactagtacggctcatgcccatcaggctggcgagtacatctactgtgagcgcagggttgtcaatgttgtcttttatattctttctgacatctgctatgaactgccagtcgatgtcctgggagtagttgatgtattcttcatcatcatcattctcttcatcctccgaatccaggctggcatatttgttgcgtagaagtgcgcgattagccaacaagttggagatggttgctttcaatataccgatattgaatggctttaacacatattcatctgccccgatccgcagtccggaaagaatatctttctcattattcagtgcggtcaataagataacggggatatgcgaggtttcgatattgcttttgatagcctgacatagttcgtcacctcgcatttccggcatcataatgtccgagataaccagatctggcttatattcgggaatgacggtcaatgcttcttttccgttggaacatacttgaatgaggtggtcttcggataatgtttgtgacagataattgcgtaattcatcattatcttccacaatcagaatacgttggctcttttctttcttttcttttttttcttccttttgtgtattctcgtaaatttcaggtgccgggagtggaatgtcgttgctgctttttgtttccggacgctgtttgtttggcgttgtcaagtgtgctttgcggtaacgtttactgtctttcgggaaagttatcttgatgattgatccctgattttcgatacttgacaaatttatctttcctttatgcagccggactaatttccagactagcataagtccgataccactgcccgtcacttttgagttgatcgtgttactgccacggaaatgcagtttgaacagtttcttttgctcattggcaggaattccgattcccgtatcgctgacttccacgctccacgaatccgcagcttctgaaacaaagatttgtacactgccattttccggtgtatacttcaatgcgttcgaaatgacgtttttgaggatggattccatcttttccttgtcgaaccacacattcatgtatctgaaattactctcgtaggtgaagttaatatgtttaatattggcatattgctggaatgctccatatatttcgttcataaacgtatttagctcatgttccgaaatgtacagctcggaagaatatacatctgccctttcgaaattgataagattagtcgtaaggcgcaatagcgcattcacattacgcagagctgtattcatattagaaattccctctttgctcagttcttctttttcacggagttcttccaaaggtgctttgatcagtgtcaatggagtacggatatcatgtgctgtattgataaagaaatggatcttttcatcagagaccttacgttgttttcttaaaattataatacgcaataagacggaagctatgagaaataggatacctgcataaaacaacattgcccagaatgttaaccaaaacggctggtcaataataatatcgatgcttctttcttcaataacgacgcgtttgtcttcattagaaattgcacgtacccttagggtatattctccgggtgcgagattggtatagcgtatcgtactttcggctccgggtttgctccattcttcatagaaaccgtctaacttccaggaatatagaatattagaagggtagtcgtagttgatggaagaaacttgtacagagaaaatattctgattatatcctagttccaatgttttgatatcattgatactttcttttagcggagagtgcttgtctctcggataaacagtctgataaaagagtttgaaatcactgaaaatcattttggaagagtaatctctaggcaatttcatatctttatgaaattcgacagccccttccgaactaccaaaaacaaagtggttgttcttacgtaaaacaccagacagcgcattgaaatgcgtagtcattaatcccatatctttagtccagttataaaacttcttctgttgcggataaaaacttgttagtccgttttccgtacccatcagtaattctttgtccgcatctgataatatggtatagatattattggatatcagggcacaattctccgagtagtaatgagtgaataacttttgggcaaagtcgtagattaacaatcccgaaccactagttccgatatataacgaaccgttcttggcttgatataaagaatagatataggtagattccaccggaagtttgatatgctcgaattttccggattctttatccagaagatatagtcctgttgcactacctatccacatactattggcatctttctcagtaatggcggtaatggagttcagtccttgataaagtcgtacattctgcgttttcaggttgatacgttttaagttgtagaatccacctgaccagatatatccttgtgagtccatacggatatcgcgaatatatttgtccggtcgcatgattccttcgctatatagcggtggcatgaaatagctgatttgtagagacttcttgtctatttggtatactccggaggaatatcctcctgcccagattgtgccgggagatacttcgcagagggtaaggaagatgtgactcttgtttgcctgcggtttttcaaaagaactgaggaccgaactccattggccggtctttgaattgaagaagctgataccattgtttgttgcgaaccacaaatctccatctctgtcctcaatgactgcatttacttggtcgttgattaaagattgtttgttgcctatagaatgcttaatccatttgtagctggggtaacggttattccgtattgtaatcccaatagggtagtttgccagccagatacgttcttcatcgtctacataaatgtcattgatactgttgccgttcatgccattattactgttgtagtttgtgatgatataaggctccagtaagtagttttcagtatttattttatgaactcctcctccgtctgtggctactagcaattctttgtcattcagaggcttgaattgcgtgatactgatatcttttaaattgcgttccggctgtgtgacggatttgatactcatgtcgtaaacgaaaattccccgttggaaagttccgataaatagtttcccgatttttctatcaaaatagagatcgatgacttgaactttttgattttccaatttgtcacagtcgataagttccaaagtgttgttttccagtttggcatagtgaacgcccctttccgtgccaataaagaaatgagatttatctatttgttcgatatctgtgatttcttcttttattttattctttatgtgaccgatctggccggtagctgtgttgtagaggaagattgtttcttcattgcatagccagatttgtttgttttcgtcaagccatgcaaagctgataggagcaggtaaatcgcgaaagttttctatcggcagcttatagacaagttcgaaggtatcgtgaagctcatcgtatcggaatatctttcctttttttccgatttcccataagactccttcttggtcgatgtatagccagttgagatttaacagagaattcacttctatgtcgccatccatcagtttatattgtttgaactcttttccgttataacggtcgattccttcgtgagtgagaaaccacatataaccgattttgtctttttgaatgcagtaaactcgccgattacttaacccatcttccactccaagatattgatacgtctgagcgacacaggttagaggaaacaataataatagaaaaatccattttttcatgtgaaaggacttttaagggttattgaatcttattctagaggaggaaaagtttgacaaaattaggaagaattttcgatataacaaaattttggataaagataacgtggatctcaaatatctggcggatcagttgttctattgctgtttgtatatgttgcttatttcagagaattaagttgcagaaaacaggaattaagttagagcgggaagcagaaggagaaaaaagagagtgtatcagaactgacacactctctttgtggcataaaattttaaaggactgtttatttcatttttgtctcaatccacttgtaggcattgacaaatgcttctatccatggagttacctgatcgctgtttttacgatcggtcggataacaaccgttttgccacgggaagatagaacgttccaagtgaggcatgatagccaggtgacggccgtctgcactagccaatgctgcgacagaatagtcggaaccgttcgggttagccggatattcatcatagctatacttcgctactacattatatttatcctcatcgtatggcaaagagaactttccttcaccatgggccacccaaatacctagtttgctaccacttagagaaccgaacattacactgcggtttgtcggtatggtaaggccgaggaagcgtgactcaaatttatgtgaatcgttgtgcaacatcttgccttttttctccagttcaggattgataaggttgagctccatcattaactgacaaccgttacaaacgcccaatgataaggtgtcttcacgtgcataatatttatccaatgcttcttttgctttaggattgaataagaatgcacccgcccatcctttggcagaaccaagcacatcagagttggagaaaccaccacagtaaacaatcatgtttacatcttccagtgtttcacgtccactgataaggtcggtcattgtaacgtctttcacatcgaagcctgccaagtagagtgaataagccatttcacgttcgccatttgtacccttttcacggatgatggcggcacggataccgcttggagtacgacggtccggagtaatgccatattgagaaagcttacctttgaattccggcataaatgcgaattctacaggttgcatcttgtagttctcgaaacgtttcttggcgcaaccgttcatagactgtttgcggtcgagcaggtaagaggaagaataccagacatcacgcatataatcgatgccgaactggtaggtggcatcgttcttggataccagaatgtgacgttcgtcagtcggtttacccaatttcacgaaacctatacctgcatcttccagaatcttcttcacttcattcttatgcttgtcgctgatctggataacgatacccggattttctgcaaacagaatcttaacgatatcctgttccttcatattgtcaaggctgatttccataccgccttctacgttagagaaacacatttcgagcaatgtggtaatcaaaccaccggcagatatatcgtgtcctgcaagaatcagtcctttgttgacaagttcctgtacggcaaggaatgcatcgcggaaatattcagcgtcctgtacgcaaggtacatcatcgcctactttacccagagattgggcgaaagccgaaccacccagtttcagttcatcgaagctgaagtcgatatgataaagtgtagtcttttcattgttaaccaataccggagatacaactttctttacgtcggaaacttcgccgcctgcagaaacaatcactgttcccggagaaataactttctcaccgttaggatacttctgtgtcatagacagagagtcttttccggtaggaacattgatctgtagcgcacagcagaaatcgcttaatgctttaacagccgtgtaaagacgggcatcctcaccttcttgagagcggcaaggccacatccagttggcagacagagaaatgctgtccataccttctgccattggagcccaaaccagattggtcagcgcttcggatacggaaaggatagagccggcagccggatcggctaatgctgcttgcggagcatgcccgatagaggtagcgatacctttttcgccacggtagtcgagtgctacgacaccacagtcgctcaacggcaactggagttcaccctgacattgctgacgagctactttgcctgttaccgaacggtctaccttattcgtcaaccagtctttgcaagctacagcctcaagctgcaatacattcgtcagatattcatgaagtttaggcaattcatatttcggcatttcgtaatgacgttccactgttttgtctatcatgtatgtcttgggagaagaaccgaacatttgttctacggcaaggtcgaacggacgtacgccgtcagcttgttggaaagcgaaacgatgatcaccggttgtttcaccgactacgtacatcggagcacgttcacgttcggcaatcttacgtacgtgttcgattgcttcttcttttatcagcaggcccatacgttcctgactttcattagcaatgatttctttggctgataatgtcttgtcgccgataggcaatttgctcatgtcgatcaatccaccgcattcttctaccaattcggacaggcagttgacgtgtccggccgaaccgtggtcgtggatagaaactactggattcacgtcttcttcgcaaagagcgcgtactacgttattggcacgtttttgcatttcggcgttggcacgttgtactgcattcaattcgataccgctactgtaacggcctgtatcgactgaagaaacagaaccgccacccagtccgatacgatagttatcaccaccgatgaccacaactttatttcctgcttcgggagctcccttcaaacagtcgcgttgcgtaccgtagcctataccaccggcaagcatgattactttgtcgtaaccataaacttccttattctctgtgtgctcgaaagtcagcaccgaaccgcagattaacggttgaccgaacttgttgccaaagtcggaagcaccattggaagccttgataagaatctgttcgggagtctggtatagccatttgcgtaccggaaggatttcttcccattcgcgtccctcttccgtgcgtgggtaagaggtcatgtagacagcagtacctgcaatcggccaagagcctttaccaccacccatacggtcgcggatttcacctcctgtaccggtagatgcgccattgaacggttctacggttgtcgggaaattatgtgtttccgctttcagtgagataacgcttttgatatcctttatttggaaataatcaggtttggagtgatctgccggagcaaactgttccacaaccggaccttcagcgaaggctacattatctttataagcggagatgattttgtttggattttcctgtgtggtttttttaatcatctggaacagggaagattcctgttctacaccgtcgatgatgaacgttccgccgaaaattttgtggcggcagtgctcggagttgatttgtgcaaaaccgaaaacttcagagtcggttaacttacggccgagatcgttttctactttcttcaggtagtccatttcttctttagaaagtgccagaccttctttttcgttatacacttcgagatcttcgatgtaaatgatcggctccggctgacggttggttgtgaatacgttttggtcgagtcctttgtacatacgttggagcatcgggtcatgatcggcattttcgtccttaacagggaagtattcctcgatgcggctgatgccttcaagccccatgttttgggtgatttctacagcgtttgtactccaaggagtgatcatttcgcggcgcggaccaacgaaacagcctttcaggttttcttcactttccatcacggcttcgccaaaaagccagcagagtttattactttcgtcagggatgagctgatggttgctctctacggcaatcacgctcttggaaggggttctgaaaaaaagaatcatgtcttatatatatgattttatgatttgccattttataattgaagtctctgtagaagaaactcttctcttttgcgccacaaagataattaatttcattggtggtaggaaaaaaaagaagaataaattccaatcgtatatttaatatgtatatttccgatatgcagttttacttgttgttagtatattcttgattcttgtgtggaaaaaacgttaatatcctatccccatatcataaaaaagtgcgatatttgcgacatgattcagatagagacaatattcgatataatagttaaaggctttattattggcgttgttgtgtccgcacctctcggtccggtgggcgtgctgtgtattcaaaggaccttgaataagggacgctggtatggctttgtaacagggctgggagcttccttgagtgatatagcatacgctttgcttaccggttatggcatgagttttgtatttgattatatcaataagaatattttctatttgcagctgttggggagtattatgctactcctttttggtatatatacctttcggagtaatccggtacaatccattcgtccggcttcgtcgaataaaggttcctattttcataatttcattaccgctttttttgtaacactttccaacccattaattatattcctgtttatcggactttttgcccgttttgcatttgtgcagccgggtgtattggtgtttgaagaaattacgggatattttgccatagctatgggggctttgacgtggtggctcggaatcacttattttgtgaataaggtacgtacaaaattcaatttgcgcggtatctggatactaaaccgggttattggcagtattgtgatgctggcgtctgtagccggactggtttatacattgctgggagagtcactttattaagaaatagcttatgaatcagatagcacaacaactgaaagaaaagaatattgccgaataccttatatatatgtggcaggaggaagatctggtccgcgccaatcattgtgaaccggaggaaatcgaagcgaatgtgattgcccgctatccggaagaccaacggcctgccatgagagagtggtatggaaatctgataacgatgatgggtgaagaaggtgttcgtgaaaaaggacatctgcagattaataaaaatgtaattatcaatttgactgaattgcataatgcattgacttcttctcctaaatttcctttttatagtgccgcatattttaaggcattaccatttatcgtagaattgcgaaataagaacggtaagaaagaagagcccgaattggaaacttgctttgaggcattgtatggtgtgtttttgcttcgtcttcagaaaaaaacgattagcgaaggcactgcaaaagcagtggaagctattactagtttcttgtctatgttggcgaactattatgataaagaccgcaaaggtgaattaaaattggacgaataaatgagaattttagtaacgggtgccaacggtcagcttggcaatgagatgcaggtacttgcgaaagagaacccgcaacatttgtattattttacggatgttcaggaacttgatatatgtgataaagaagccgtttggtcatatatttctgaaaaacagattgatgtgattgtaaattgtgcagcttatacggcagtagacaaggcggaagataaccgggaattggctcataaacttaatagtgtagctccgggcattctggcacgtgccgcgcaagccaataatgctgctatgattcaagtgtctacggactatgtctttgatgggactgctcatactccttatgcggaagaatgcaagccttgtccggactcaatttacggttctaccaagctggaaggtgaacaggaagtgatggaccattgtgagaaagcggtagttatccgtaccgcatggctttattccatttatggaaataatttcgtgaaaacgatgattcgtctcggaaaggaacgggatggtttgggagttgtttttgaccagataggaactcctacttatgccaatgatctggcgcgggctatttacacaattatcaataaggggatagttcgtggtatttatcatttcagcaatgaaggcgtatgttcctggtatgactttacggtagctattcatcgtttggcgggaataacctcttgtaaagtgaagcctttgcacactgcggaatatccggcaaaggcaaaccgtcccgcttattccgtattggacaagacaaagataaaaacaacgtttggcatcgagattcctcattgggaagagagtcttgaacgatgcattggtaaaatgaagaatgatgaataaatatggcagataatacagaaattttgagacggcgaacgttcgccattattgcgcatccggatgcgggtaagacatctttgacggagaaattattgctttttggaggacagattcaggtagcgggtgcggtaaagagtaataagattaagaaaacggctacgtccgactggatggagattgagaagcaacgtggtatttcggtgacgacttccgtgatggagtttgattatcgggactacaagattaatatcctcgatactcccggacaccaggattttgccgaagatacataccgtacgttgactgcagtggatagtgtgattattgtagtggacggtgcaaaaggtgtggaaacacagacgcgcaagttgatggaagtttgccgtatgcgaaagactccggtaattatttttgttaataagatggaccgtgagggaaaagacccgttcgatttgctggatgaattggaagaggagttgatgattcaggttcgtcccttgtcatggccgattgaacagggacctcgttttaagggggtatataatatttatgaacagaaactggatttgtatcagccgtctaaacagatggtgacggaaaaggttgccgttgatattcatacggaagagttggataagcagattggcaaaacgctggcggataagctgcgtggtgatctggaactgattgaaggggtttatccggagtttgatgttgaatcttatttagcgggtgactgtgcaccggtattctttggatcggctttgaataacttcggtgttcaggagttgctgaactgtttcgtggaaatagctccgagtcctcgtcctgtgcaggctgaagaaagagaagtgaaaccggaagaacctaaattcaccggatttatctttaagattaccgctaatatcgacccgaatcaccgttcttgtgttgcattttgtaagatctgttccggaaaatttgtacgaaatgctccttatcagcatgtacgtcatggaaaaacaatgcgtttttcatcgcctacccagtttatggcacagcgtaagacaacgattgacgaggcatacgccggagatattatcggtttgccggataatggtactttcaagattggcgatacgctgacggaaggtgaaatgcttcacttccgcggcttgccgagtttctcgccggaaatgttcaagtatattgagaatgccgatccgatgaagcagaagcaactggctaaaggaattgatcagttgatggacgaaggtgtggctcagttgtttgtcaatcaattcaacggtcgtaaaattatcggtacggtggggcagttgcagtttgaggttatccaatatcgtctgttgaatgagtacaacgcatcttgccgatgggagccggtgagtctttataaggcttgttgggtagaaagtgatgacccggcagaattggaagctttcaagaaacgtaaatatcagtatatggcaaaggatagggaaggacgtgatgtattcctggcagattccggttatgtacttcagatggctcaaatggatttcaaacatattaaattccattttacaagcgaattttaaagtatattctatactttggaaattttggagagtgtgaaagaacgttcctttgagctttctttcacatttgttttatatgtctgcgagcaagaaactttatggttttatactttattatccctcccttaattaattttataataaatatttggtattttcgaacgctttttgaataaacgactgaaataactaataatttaattatatggaaaatattgaaacagcgatcctgctgatggtagtcggaatggctacagtatttgttattctgctgattgtgatttatttaggcaaatttttaattactctggtcaacaaatatgctcctgaagaagtgcttcctgcgaagaaggaaacacagaaaggtcctgcacctattccgggaaatattctggccgctatcagtgctgctgtgaatgtggtgacattaggtaagggaaaagtcactaaagtggaaaaattataaatctataaaaagttatatcattgaaagacatgaaaagagaagtaaagtttagtttggttttccgagatatgtggcaatctgccggaaaatatgtacctcgtgtagatcaactcgtaaaggtagctcctgctattgttgatatgggctgttttgcccgcgtagaaaccaatggcggaggttttgaacaggtgaatttattgtttggtgagaatccgaataaggctgtacgtgaatggactaagccgttccacgaagccggtattcaaactcatatgctcgaccgtgcgctgaacggactccgtatgagtcctgttccggcagatgtccgcaaactgttctataaagtaaagaaagcacaaggcacagatattactcgtacattctgcggattgaatgatgtccgcaatattgccccttccattacgtatgcaaaggaagctgggatgatttcgcaatgttcgctttgtatcactcattcgcctattcatactgtggagtactacaccaatatggcgttggagcttatcaaactgggagccgatgaaatctgcatcaaagatatggcaggtattggacgccctgtttctttgggtaaaattgtagcgaatatcaaggctgctcatcccgatattcctgtgcaatatcacagtcatgccggtcccggatttaatatggcaagtattcttgaagtatgcgaggcaggatgcgattatatcgacgtaggtatggaaccattgtcatggggtacaggtcatgctgatttgctgagtgtacaggctatgttgaaagacgccggatatcaggttcctgaaatcaatatggaagcttatatgaaggtgcgtgcattaattcaggaatttatggacgattttctcggattgtacatcagcccgaaaaaccgtctgatgaactctttattgattgctcccggattgccgggcggtatgatggggagtttgatggctgaccttgaatccaatcttgaatctatcaataaatacaaggcaaaacgtaatttgccgtttatgacacaggatcagcttcttattaagttgtttgatgaagtggcttacgtatggcctcgtgtcggttatcctccgttggttacaccattcagtcaatatgtgaagaatctggccatgatgaacgtgatggcgatggagaaaggcaaagagcgctggggaatgattgccgacgatatttgggatatgattttgggtaaagccggacgtttgccgggtaaactcgctcctgaaattattgaaaaggcggagcgtgaaggccgtaaattctttgacgggaatccgcaggataactatccggacagtctcgataaataccgtaagttgatgaaggagaataaatgggacgtagggcaggatgacgaagagctcttcgaatatgccatgcatccggctcagtatgaggcttacaagagtggaaaagcaaaagaagacttcttggaagatgttgctaagcgtcgtgcagaaaaagataaatctccggaggaagatgcaaaaccgaagacactgactgtgcaagttgacggacaggcctatcgtgtgacagtggcttatggtgataccgaacttcctgttgcatcagccgctaccgctgctccggctggagagggcaaggaagtgctttcaccgctagaaggcaaatttttcttggtgaagaatgcgcaggagactgctttgcaagtaggcgacacggtgaaagaaggtgatgtcatttgttatgtggaagccatgaagacttacaatgccattcgtgcagagtttggtggtacggttactgccatttgcgttactccgggagatgctgtttcagaagatgatgtattaatgaagataggataatgaacgagatatttgagaatttatacgagatgactgcgttcagcaatatcattgccgaaccgcagttcctgataatgtatgccatcgcgtttgttctgctctatctcggtatcaagaaacagtacgaaccgttgctgcttgttcccattgctttcggggtgttgcttgccaactttcccggtggagatatgggagttattcaggcagatgagaatggtatggtgatggtaaacggagtgttgaaaaatatctgggaaatgccattgcatgacattgcccacgaattgggattaatgaacttcatttactatatgttgataaaaaccggtttcctgcctccaatcatctttatgggtgtcggtgcgttgacagattttggaccgatgttacgtaatttacgtctttccatatttggtgctgctgcgcagcttggtatctttaccgtgttgctggtggctattttgatgggatttactccgaaagaagcagcttctttgggtatcattggtggtgcggacggtccgacagccatttttacaaccattaagttggctccgcatttgctgggaccgattgctattgccgcttattcgtatatggcgttagttccggtgattattccgctggtagtgaaactgctttgttcaaagaaagagttaagtatcaacatgaaagaacaagaaaagaagtatccgtcaaaaacagaaatcaaaaatttgcgtgtattgaagattatcttcccgattgtagtgactactgttgtcgctcttttcgtacctagtgcagtacctttgattggtatgttgatgttcggtaatctggtgaaagagatcggaacaaatactttccgtttgtttgatgcagcttctaacagcattatgaatgctgctactattttcttaggattgtccgttggtgctactatgacgacagaagctttcttgaactggacgactatcggtatcgtgataggcggattcttggcatttgccctttctattacaggtggtattctgtttgtgaaattggtaaatctcttctccaagaagaaaatcaatccgcttatcggtgctaccggattaagtgctgtgcctatggcaagccgtgttgctaacgagattgctttgaaatatgacccgaaaaatcatgtattgcagtattgtatggcaagtaacatttccggagtaattggttctgccgtagctgccggtgttctgatttctttccttgcgtaattaggaacaactgatttctgaaaagaagggagtgtcaacattctgcgttttgacactctcttctttgttagatgaatttaaaatttggtttttattattcactgataactcttctgtattccgctattgccatcttttctgataagtatgcattaatcaagtttgtatgtgcttgtgtccatgatagctgtgcggataatacgtctaccatatttgcttttccctcgttgtaagagaaagaaaccaggtcgagattttcattagccagattcatcgtttctgtggctgtcttcacctgatattccgtttctgtcaacttagtaagtgcggctgaaagttcttcgttaatattatccgtcacatagctttgttgtaacttctgtattccgataaatgctttttgttggcggttcgtcttgaaacgggcgccccatctaaaaattgggatattaagattaatgccgacaataggattgaatgagacatcatatccgagattgggcgtaccagttgcccatccaccactgaaatacatactcaactgaggattgaattgacttaatgcggctttacgttgcgcctgacttttcatgatgttcacttccgtactttcataatccgcacgtcgttgcaatacattttcaagagaaagaatttgtataggagcagaagtcttgtcaatagtataaagactgtctacgggggtgttgggatctattcccatcaaaatattcaatttctgcaatgccaacgtgtaattctgacgggctttgatatattgaagttcagcttcttttagccgggtggaaatcatgagtaggtctgtacggctaatcattccatcattgaaacgatctagaataatatcatattgctgttttacgatatgttgatatttatcggcagcttgcagcattgcttgtgaagcagacgcattccaatagactgcatcgctctgataatgaatttggtcgattgtcatttcctcattgagcaggccgagtttttcatccgctttggtaatcttgtgttgagcgttgagtgctcctcctgtataaagaggttgcgagacgacgaatactccttgataggtgtggttacggtattcccctaatggctcgttccatgctttaagatcactcatattgagtgtaccgtccgcattgatatcgattttgggcaggaaaccggtatgagcaatcttacgtgcctccgcacttgctatagtttttagtttctgttgcttgagtatttgactataagcttccactttatcccggtacgcttcccggctgagaaaggggtgttgtgcctcggctgtaagactaaggagcagcagagacagagttattagttgagttctcattttattcattgtaatttatttcttctgtctaaataagggttatatttagtttttgattctttggatagagcaataggccaccggaagaacgaatagcgtcagagctgaagctaccaacaatcctcccataatcgtagccgccatacctccgaacatcgcatcaaatagtagcggtaacattcccaaaattgttgttccggaagccatcgctacgggtacgatacggctggttgtagcactgactacagcttctaaaggctttttacccatagctgtttccaagtctatctgttcgacgagtacaatcgcgtttttgatattcattccaatcaatcctagtaaaccgagaatggaaaagaagtcgaacgatttgccaagtactaataatcccaatacgataccaatgaagatcagtggtaacatcaatagaattacggtcggtttgcgatatgtcttgaataagaacagcaaggttacaaacatcaggaagaaagtcagcggtaaatttttagccaacgcctcatttgattcgacttgactttcctgttctccgaagtacttcattgtatatccttccgggactttaatttctttctgtacctgagaccacacctggttgaaagcggcaattgcatttactccccgacgtgggtcgcattgtgccatcattaccatctgacggttgtaatcctttacattcgagaatcggtattggaaatcaaaatccgataccacttgttccagactggttgtttcatttccggtaccgaatacgggtagggtacgcaagtcattgatacgaaatgagtccactgtattatctttcaataatataggaagcacttggtctccttgcctgtattcccctaatgtcattccggtggtaccgatctgaatgctttgagccattccttgtcgggagactcctagaggttgtgcccgttccggactatacaccggtttccatacggggattttatttccccatgagtttcggatattaattaaatccgagttttgatgcataatctccagtgcttgattggtaagtgccacgagtgtatctacattcggtcctataaagcctatctcgatagctgcatctactgcgggagatagtttgaacaggctggtacgggtgattgcattcggatagttggctttcatatatccgtcgaaattctcttcatattctttcgtatacttgctatccgtcaattcaactaatatattggcaaaattcggtttgggacctaccgaagtggaagccaggtaataccttagcggggtgcttccaaaagtgattgataccttttttacttccggttgcttcgctaaatggtcttctaccgatttcatttctttcacgacatcttggatgctatacccatcaggatagaatacgtctgctcggaaatagggtttgtccaaagaagggaagaagttttgtggcattgttcccatgataaccagcgagataatgaacagtaccaccattgaacctaatgttaacgcttttctgcgaatcagtgcacgtaggatggaagcgaacttgtggtagaacggtttatcgtatggatcttttgctccatcgtttacttttgctttcaggataaaattaccgaatactgtggtctgcgtgagagcaagtacccaactcaatcccaaagatatggcgagcaccacgaaaagcggttttactatctccgccacagaagaaggagcgagataaagcggtaagaatgaacaaatggcaatgaatgtagctccgagtaatccccattgagggccggtagcgccatctattagggcctttcttcgatttaccccacgtgcaatagcgatttgtgcattgtctgttaccacaatggcgttatccaccaacattcccatagcaataatgaatccggcaagggaggtacgattcagtcctacaccgaagaaagacatgatgagtagcgtcccaccgatggaaaaaataagtgacgagccgattagtacaccggcgcgtaagcccattaccagcataataattacaattacaatcagaatagattcgatcaggttgatgatgaatccgttgttggcttcgttggctatttcattttccagatataggctctgcaactccagacctacgggcatgagtggcaacaattcgttaagtttgttttttacattttctcctgtctgtacaacatctcgttgcgggtcagtcgatacaccgataccgatggcacgtttgccgtttacgtgcatgatgttggacggcggatccatatatcctttctctattacagcgatgtcacccagtttcacttgtccggcttttgttgtaattacttggttgcggatgtcgtcaacagtagtatacataccgttggctgttacccgcaactgctgttcgtcggctcggatttctccggtattgataatctggttttgtgattgcagcagacttgcaagttgtttcggatcgatacccatgccaactaatttgttggttgagatatagatattcactacctctgtctgtactccgaatagggcaactttcatcactccatctgctgtgactacctgtgttttaatccgttcagcccaattgcgcatctcttcgtaagaataaccttcatctgccgtcagtccgtaataaattccgaatacatcgccaaaatcatcagaaacggtcggggtagatgcgccatttggcaactggggttgtatattgagcacctttcgtcgcaattcatcccatttttggggaatggaattggctgctaatgaaggttgcagttcaaatgtaattttagagagtccgtacatagattctgatttaatcttatatacgccactcatactttgaatctcacgggagataggttcggtaatcagtcgttctacttcagccggttcggcacccggataacgggtcatgataaccgccgacttgatgacgaacggagcatcctctttctttcctagcttaccgaaggaagtgattcccccgattagcaatactgcaagaaagaaatagataattttcgtgttgtctaatgaatatttagctaagttcatttctcgatttcttttacggtttctccttctactaattggtatacgcctgcgataatgatcttttctccgggtttcagaccttctgagattagtacttgagcttctccggtaggtgcattgacagtcacttcacgtttgtgtactttgttgccttccactacccagacatacattttcttcccttcactttcgctaaatatggcgctgagcggtatgattgtccaactgtcctgtaccaatggaccgacatcggccgtgaaacgtatgctacacgtaaagcccggtttcacagcataaagatctcgatcgaaagacggatcatcaattgttatgctgaccgggattcccgtgccgtctgttgatatatcaaggtattcttctaattttgcctgaaagatatgccctctgaatgtgtcgaattctactagaaaacgaggatctttagtgcgaagtagatagagatagacatccggtatagtgaatttgatacgcagattacgtgtgttgactagttgcacgataccttctccggagttgacacgctgatagttttctaccagacgtttttcgatggagccgtcgaaaggagctgtcagttttgtgtcgcgcatattattgacggacaactcatattcggattttgctttctgatagttggcaaggctgatttcatattcctgcacagagatcgcttggcgggagagaagccgtttgttacgttctaactgtgcagctgccgtttcgtaagcagatttggttgcggcatattgtaatgcaatatctctgggatcaatggctgcgatcagttgtcccttctttactttttctccctcgatgacgggcaattgaatgatctgtccactgacacggaatgccagttttacatattctaccgcttctacaattcccgaaaaatcttttctgataatcgatctagactcaacaattgcagtctttacgggacgacttgttgttgtcttcgtctcttttttctgtccgcagcttgccagtaaaattgcagctatcaggacgaatccatatttcttcttcatataccatactgatgtttagagtttttgcgttggttcgtttctctttattacagagaataaacaacttatggatatgaatgttcgggaaaaccgaaagatttaggttttaacttctcggtcttttcgatcttccggaaaagattgtgagttcaaaaatggtgaatatgatttctgtcgttgtataaccattaagatcatattccaggttttcattttcatcgtagtacttgaggtagacagttggagtacctttgtcgaaatcgagaaaaagataagaggtataatcgtagatacctaaattggcaaattcatttaagatagcagtgttgaaaagagtgcaccatcctgtagtctgttcacagccggacatttcgaacctacgatgctctttgctgaaatcatcctcgtccacatgtttgagttgcctttttatttccgaaccgaaagaaaggcgctttctgataaaattgagaacttcttctttagtcatttgttctaattgggttatttccattactttagtttgtttattatctaacaaaggtagtttctttattcggtaaaaactgtgtacgctgatattttttaagatttttctgttctctctatgtagtttaaaatgaaaaagaggaaattccctgctgagaatcccctcttttcatctttaacgaaagatcgaattatttcttcttacggtcaccgtaacggctcatgaacttatcaacacgacctgcagtgtctaccaaagtagatttacctgtatagaacgggtgagaagtgttagagatttcaatcttcagcaacggataagtttcaccttcgaactcgatggtttctttagttgctactgttgatttagacaaaaacatgtcaccatttgacatatctttgaatactaccggacggtatgattctggatgaaggccttttttcatttcagtatctgttttttaatttatattctgttactattttggtaagaaatagtgtaatggtcattttcagtgcgcaaagataatgcttttctgtgaaatagaaaaaggttttgctgaaaaacttttgtttatgacgcattgcctattatataataaggtgtatttgcccgaagagttattatttgtcttttagttatttatttgcaaggtagacattacaatctaatgtctaccttgctttccggcaagaaatagatgttctatttaaacctttttctactatatttttctttccgatgttcgttattcggtggataatgcttacttttgcgtagaatttttattcactaacaataaactttaaacaaaatggtaaattacaaagatttaggattggtaaacacgagagaaatgtttgctaaggctatcaaaggtggatatgctatcccggcattcaacttcaacaatatggaacagatgcaagctatcatcaaggctgctgttgaaactaaatctcctgtgattcttcaggtatctaaaggtgctcgtcagtatgctaacgctactttattgcgttacatggctcagggtgctgtagaatatgctaaagaattaggttgcgcacatccggaaatcgttctccaccttgatcatggagatactttcgaaacttgcaaatcttgcattgattcaggtttctcttcagtaatgatcgacggttctcatcttccttacgaagaaaacgttgcattgactaagaaagtagttgattacgcacaccagtttgatgtgacagttgaaggcgaacttggcgtattggcaggtgtagaagatgaagtttctgctgaccaccacacatatactgaccctgaagaagtaatcgattttgctactcgtacaggttgcgactctttggctatttcaatcggtacttctcacggtgcttacaaatttactccggaacaatgtcatatcgatccgaaaacaggtcgtatggttcctcctccattggcattcgaagtattggacgctgtaatggaaaaacttccgggattcccaatcgttcttcacggatcatcttcagttcctgaagaagaagtggaaactatcaataaatatggtggtgctttgaaagctgctatcggtattcctgaagaagaattgcgtaaggctgctaaatctgcagtttgcaaaatcaatatcgactcagactctcgtttggctatgactgctgctgtacgtaaggtatttgctgaaaaaccggctgaattcgacccgcgtaaatatcttggtccggctcgtgacaatatggaaaaactgtacaagcacaaaatccttaacgtactcggttctgacaacaaattggctcagtaatcagattattccaatataaatatataagaaaaggctgcaaccattatggttgcagccttttctagttttatgattttctttataaatcgtgattttacattaagaatccaagcaggataccggcagcaactgcagaaccgataactccggctacgttcggacccatagcgtgcatcagcaggtaattggtcggatcgtattccaaaccgatgacttgtgagatacgtgcagagtcgggaacggcagatacgcctgcattaccgattaacggattaatcttattgcctttcttcaggaagagattgaatatctttacgaagattacgcctgaagctgttgcgatgataaatgacaatgcgccgagtgcgaaaatcttgatagaatcgaaagtcaagaactcggaagcttgcgtagaagcgcccactgtcaatcctaacagaatagtgatcgtatcaatcagcggaccacttgccgtattggctagacgacgtgtcactccactctctttcaataggttaccgaagaacagcatacctaacaaaggcaaaccggaaggaaccaggaaacaagtcagcaacagaccgataattgggaaaatcactttttccgtatgagaaacagcgcgtggcggcttcatacggataacatgctcgctcttggtggtgagcagacgcatgataggtggctgtatcaccggaaccagtgccatataagagtaggcggatacagcaatggctcccattaaattaggtgctagtttggaagacaagaatatggctgtcggaccgtctgcaccaccaatgataccgattgctccggcttgcatgggatcgaatcccatttccaatgcaatcatgtacgcaccgaagataccgaattgtgctgctgcaccgatcaacatcaatttcgggttagagatgagtgcggagaagtccgtcatagccccaatgcctaagaaaataagcggcggataccatccggatgtcactccttgatacaatatattcaaaactgaaccttcttcataaataccgactttcagtccggcatccatattgaaaggtatattaccgatcagtataccgaatccgataggaatcagcaacatcggctcgaactctttggctactgccaaatagataaaccccaagccgacaagaatcatgactatgtgtcctgtcgtagcgttggcaaagcctgtgtaggtccagaagtcggctaggttgtttcctaaaaagtttatgaaatctcccatattattcgataattacgaggtcagtaccttcaagaacagaatctcccttgtttacgttgattgcagtaatcttaccgtctttgtcagcattgatattgttttccattttcatggcttccaatataatgatggtctgtcctttctttactgcatctcctacattaactttaatatcgaggataacacccggaagtggagatttgacgcctgattttccggaagctggagcggccggtttcaccacctgagtaggagcggccggtgcattaggcataggacgtactaccacaggttttacggctgctttgggcttcttttccatttccactttataatgcgtaccgttcacttctacgtgagcgatattatcttcaatatctccgatggttactttatataagttaccgttgattttatatttatattctttcatcgtttttactttttataaggtgacttactttctgggaggagtttcgcgcaaagtataaatctttgaactccacggtgaatagctccgttttacgcgagtaatggtcagtacagtttcttctacatcatgtacttcatcctgcatttcgtgcaatgccatagaaatagcggcataaacttcgcccggagcttgtgacaactctttggcttcatgcttgtcgattcctttggatttcattgtattacgcttactcaggttgacggcgactttacctactactttgaaagcgatatacagaaggataagtccgcagaatactacgctcatggctgaaatggacatgccgataccaaccgagtcatgttcttcgaatttttccatcttggcattgctgtcaagagtttggttatttgtgctcggtgtaacatatttgtcactgcttccacctttcacttcccattctgctgctccgtcgctaacacgtgcatacgattggttagggcctaaaacaccggcgggtatcacaacctcgtcgattaactttttaccggagtcaaataacccgatccaattggcggcttccggattcagcttgcaacttgtgtggaaagtaccacggttaggctcgccgtctgcccagaaaagggcatgttgacgcggctttatcagtgtcagtacgtcacctttcggaataaagtaagtaactgtatcgcccggttggttgctcactttcagtaagcaagctgccagatcggcgctaccgaatgatttattgaatatttcaatccatgcgctgtgcagtccgtagtcatcctgaaaattactttggttgtctatcaggacttcgttcagtaccagcttgctgttcgactttttctctccacaagaagtgagcccgatcagtaatagcagagaaaggaatattccgattttggttttattcataatcgttcttgttttaatgtgaaaagttggattacaacggaatatttccatgcttcttagccggattggtcagtttcttagtctgcaactgttgtaaagcgcgaataacacggaaacgtgtgttacgtggctcaatcacatcgtcaatgtaaccgtatttagcggcattataaggattagcaaacaatttcgtgtattctgcttctttctcggctaggaattgagcgggattctcctgatctttagcttcgcgtgcatataatacctctactgctccggcaccacccattactgcgatttcagcagtcggccatgcataattcatgtcaccgcgaagctgcttacaactcatcacaatatgagaacctccgtaggacttacgcaaagtaatagttactttaggtacggtagcctcaccgtatgcatataataatttagcaccgtgcaggattacaccgttgtattcctggcctgttcccggaaggaatcccggtacatctaccagcgatacgataggtatattgaacgcatcgcagaaacggacgaaacgtgcacccttacgagatgcgttgctatcgagcacacctgccagatatttcggctggttggcaacgatacctactgactgtccgttgaaacgtgcgaaaccgatgataatattcttagcataatctttttggatttccaggaattctccgttatctacgatggctccgatcacttcgtacatatcatacggcttagtcggactatcgggaataatatcattcaaagaatcttccagacgatcgattgggtctgtgcaatccacatacggagcttcttcaagattattttgaggaatatagctcaacagtttgcggattaatgcgaaaccttcttcttcggttttggcagtgaaatgagtgacgcctgatttggtagagtgaacacttgcgccaccgagattttcctgactgacgtcttcacctgttactgtttttacaactttcggtccggtaaggaacatataggaagtaccttccatcatcaaagtgaagtccgttagagccggagagtatacggcaccaccggcacaaggaccgaagataccggaaatttgcggaatgacaccggaggcaaggatattacgttggaagatttcagcatagccggcaagagcattgataccctcttgaatacgggcaccgcctgagtcgttgatgccgatacaaggtgcacccatcttcatggcctgatccatgattttgcaaatcttctgtgacattgtttcagacagtgaaccggcagaaacggtgaagtcctgtgcgaacacatataccagacgtccttcgatagtaccgcaaccggttactacaccgtctccgggatagtgcttcttgtccatgccgaagttcgtacatctgtgctcaacgaacatgtccatttcttcaaagctaccttcatccagcaacatagctagacgttcgcgtgctgtgtatttccctttttcatgttgcttcgcaattgctttctcaccgcctccgagacgtgctacggcacggcgttcaataagctctttaattttttcaagttgattactcatgagttcttgttagttttagagtttatgattaatgttcgcagagttctgtcagcacacctagagtggacttcgggtggaggaaagcgatattcaaaccttcggcacctttgcgcggagccttgtcaatcaggcggatttctttgctttctgcttctgccaaggcattggctacgccatcttctacggcaaatgcaacgtgatgaacacctgcacctttgttttcaataaacttagcgatggtactctccgggcaagtcggctccaacagctcaatttttgtttcgcctacttttaagaaagcagttcttaccttctgatcttccactgtttcaatgttgtaacatttcagacccaatacattttcgtagtaaggaagggcttcttcgatgctttttacagcaatgcccagatgttcaatgtgtgaaatcttcataactatacttttttatttggttttaattatgtgcttatatggcataaaacagcacaaagaaagacaattcttacctaataaagaaatatttctgcatttaattgctgcgttataaagcataaaaaatcataggataggatatgaagaactgttttgtaatcttgagattacatttagacataaaatttgactagcagattgtttagccaagtccaactgacacgaaaccagcggcgggtactgctttgttttccgccaaagcgaagcacgaaatcccgatagccatgtttacggaacggaagtcctacatccatgaattccatgtggcggaacccgcgttgatgggcatcttccaatgctttccaaacagccagtataccgggatattgcaatgcgtatgtctttcgcattcctcctgaaaaccaaaggaaggcactttcttcggaatagatacagacagctccgccgataattttctccttatatttgacgatgaatatttttgcctgtttgcctctgatgagcatactgttcatgtgccggaagaaatcgttggcggggaaatatctgcgtatacgggaggaatagactttatgtagcattcgtgagaaatcgcgaatctcttctactgtatgtgcctcttctacttttgctccgttcttaagtcctttttttatttgccgaatacgtgacggactaaatcggtcttctacatttttcataccatgcagcgagttgcgtacccgtagccaattgaccggaaagtagttattgtttcggaagaaacgataaccgaacattgaattattcagattacggaattcgataaggaagcaggtgcgtgttgcctcctgagtgagatgctcaagcatctctccaaaaacttcctcagctttttccttgttggtggaaagcgactcatccagcccttcgccttcactgtatactacacagtgttttaccaatgaagaggggagccatctttttgctttgcggatggctgcgagtaaacgtgccatcggtttgccgttttccgttgccactatcaataaaggagtataacccggagtcgcttcgtaaatcagaaacaactctttggaatgaaaggtattctttcccggcaaatcaggaatatcctttcctttataatatgttgttagtttaagtggcattcaactacaaatttacaatttttatttctcatacaacaaaaaaacggataatttgttacttttgtgtattagtaaaatatataaatggaataactactatgattgacgaaattttagcttataacaagcaatttgtagagaagaaaggatatgaagagtatataacgaacaagtaccctgataaaaaaatagcgattctttcttgcatggatacccgtctgacagcattgcttccggcagcgttgggtataaagaacggtgatgtgaaaatgataaaaaatgcaggaggggttatttcccatcctttcggcagtgtgattcgcagcttgctcgttgccatttttgagttgggagtagaagagattatggtgattgctcattctgactgtggggcttgccacatgcatagtgaggagatgatcgggaaaatgaaagcgcgggggatcaatccggattatattgacatgatgcgtttctgtggagtagattttaattcctggttggacggttttgaagatacggagaagtcggtaagaggaactgttgattttatcgtacaccatcctttgattccttcggatgtgagagtttacggatttattattgattctacgaccggagaattgacgagaatagtataattgcattatctttgcatacattaatcagatgaaaccggaaatgatatggaaaatttcagtgaattgataaagaaccgtcgcagtatgcgtaagtttactgatgaagaactgactcaggatgaggtggttgccttgatgaaagccgctttgatgtctccctcttccaaacgcagtaatagttggcaatttatagttgttgatgataaagaaatattaaaagagctgtctcactgtaaggagcaggcctcttcctttattgctgacgccgctttggcgattgttgtaatggctgatccgttggcgagtgatgtttggattgaagatgctgcgattgcctccattatgatacagttacaggcggaagatctcggcttgggaagctgctgggtgcaggttcgcgaacgtttcactgctaccggaatgccttccgatgaatttgttcatggaatcctgggtattcccttgcaacttcaaattctttccgttattgctatcggacataaagggatggaacgtaaacctttcaacgaagaacatcttcaatgggagaaaattcatattaataaattcggaggaaaataaatatgggagctgctaaagcgagtaacagcaaagatacttatttggctactgctgttacctttatcgttattggagcactttatctgattgataaactgattcatttctccaccctcgggttgccttgggtgatgaataaagacaatatgttattgtatgcttcgatctgttttcttattttcaaacgcgataaatcaattggttttgtgttacttggtctttggctagtgatgaatatcggcttggttatgtcattgctgggttcgttatccgggtatctgctgccattgactctgctcattatcggaatcattttattctggtttgcaaaacggtaaagaagtaatgaatagaagtatagaagataccccgattgtatttatcggtgccgggaatttggccactaatctggcaaaggcgctttattacaaaggttttcgtatcgtgcaagtgtatagtcggacggaagaatctgcccgtgctttagccgaacaggtagaagccggatatacgacggatttacaggaaatatcaaaagaagcccgattatatattgtatctctgaaagatgcggcttttgttgaattattgcctcagataacggaaggaaagcaagatgcgctgttggtacatacggcgggcagtatcccgatgagtgtttgggagaaatatgcggaacgttatggagtgttttaccccatgcagactttcagtaagcaacgtgaagttaatttccgggaaatacccttctttgttgaggcgaaaagaccggaagatgtggaacttctgaaagcgatagctgcgactctttcggataatgtgtacgagataacttccgaacagcgtaagagtcttcatttggctgctgtctttatctgtaattttacaaatcatatgtatgccttagcggcggatttgcttgaaaagtataatctgccttttgatgttatgcttccgttgattgatgagactgcgcgtaaagtacacgaattgacacctcatgaggcacaaaccggaccggcagtgcgttatgatgaaaatgtgataagtaatcatcttgctatgttggtagattctccggcattgcaggaaatatataaactaatgagtaaaagtatccatgagcaccatcaactatgatttatcccgtatcaaggctttagctttcgatgttgacggagtcttgagttcgaccacagttcccctgcatccctccggtgaaccgatgcgtactgtgaatattaaggatggttatgctatccaacttgccgtaaagaaagggcttcatatcgctatcattaccggagggcggacagaagccgtacgtatccgctttgaaggcttgggagtgaaggatttgtatatgggctctgccgtaaagatacatgattatcatgcgttccgtgataaatacggattgtctgacgatgaaatattatatatgggggatgatgtgcccgatatagaagtgatgcgtgaatgcggtcttccctgctgcccgaaagatgctgttccagaagtaaaatccgtagcaaagtacatctcttatgctgacggcggtcatggctgcggacgtgatgtggtggagcaagtgctgaaagctcatgggctgtggatggcacaggatgcttttggttggtagtacacaaaaaagaacaaacagaataactaattcgtaattgataaagtaatgcttgataatttaaagaaatatcagatcatattagcttccaactcgcctcgtcggaaagagctaatgtcgggtttgggagtagattatgtggtaaggactttacccgatgtgaatgaatcctatccggatacattggctggagcggagatacccgaattcatagcccgtgaaaaggcggacgcctatcgtgcaatgatgaaatcgggagaattattagtgactgctgataccattgtttggttggatggtcaggttttgggcaaaccggaagggagagaaggggctgttgaaatgctccgtgcactttcggggaaatcacatcaggttttcaccggtgtttgcctgactaccactgaatggcagaaaagttttaccgcatcttccgatgtcctgttcgatgtcttgtctgacgatgaaatacagtattatgtcgatcgttaccaacctatggataaggcgggagcatacggtgtacaggaatggattggatatatcggagtaaaatctatttccggtagcttctataatataatgggactccccatacaaaagctgtacggggagttgaaaaagttataataaatccaacattaaaggaatgtcttcttctcgaacaccttgtttgagaagagcttcttcatctttatggaacatttccaggaaatgttcacggctttcacaggctataattgccttttcatagaaagtgaccgctttttggatatctcccatcacccatgcaacgtgcccggcattcatgtaatcgattgcctgcggcttttgtccgatgattttctcgtaatatttcatggcttgttcatatttccggctgatgaatgagcaccatccgataccacgccatgctttcacgcaattgctcttgatgaagtccaacttgaagaagtaattcaacgcttcttcatattgttccatttctgccaggcaattaccgatatagaaaattacgtttgcatcttccggagccacttcctctacctttttataataggtgagagccgcccggtagttcttagtcagccgatagcaggtagccagatggcggttgttccagatgttatccggttttagtgtatcagctttcagataggcctgaatagcttcttcgtattgttttgttttctgtaacacatatccgaacttttggtaaccgtcagcgatatcgtccccttcaaattctccgatttcttccaactctttgtagatttcgaccgcttcctcccagcgttcttttgatatatagaagtcggcgatggggaataacacgtctgcccaatacaagatattgtcgagtgcgggaacattatggaagtcaagtttatcctgaaaaatatctctgaattcctgtcggcgcacgctcagtttgaagaaacggtaaagatcgtgtaaatactggttgctgatagcacccggactttcgttaagccgttttatcatttcaggatttgaatttgaattctccatcaattcgttcatttgctgctcgttgagctggctgagcatcatctcctgctgcgcttggggtaattggtggatggtgaaaaacaacgaatatttgtcgctattgctgaaaattcccgcttcaagtatcaggtccaatacagtgtttcctttattacctgtttttttcagcgcttttagtacgctggagtgttgcttgctgaaaggatagaaccagttctgcacttcacggaagaacggataactcttcagagcggcaaatgtactcatatatacatcagctccttcaagctggagctcgctcatttcacgcagcttgtctcccaaaccggatttttcgaaagtgtcttcccaatccggattcttgtcatcgttctcttcatcgttctcctctaggtcgaatcgcatattcttcatagaagaaacagacttcaacatttcaggaataatctcttcccgcatctttttatcgattttctctgtttcctgacataagagcatttggtgataaacacgtgcgacctcctttctgaatgtagggatttcatccatgagatctactctcttgaggatttccggataaaagatcaaacggtttctgtaaatgtggaagataatcattacacctaccaatgcccgttggctaacgctgacgttcgaatgactgtatgcgttgagtagccacattattttccgcacatcgaaactttccatcaaacttagtgtgacagcgcttgtgaacaggcataaatcttctcctggaagtaattcggatgcaagcatggcttgtgcctcttcttcgtcctgaggagtccatgcgctgtttgtccataccctgacgaacatgaatttgagtgtgtcttcatgccgtttcaggacttcatccatttttgtgtcagagagtaatccgctgactgccaagtcgtcattgaaagactccaatatatgcagtattgttttaatgccgtagttcgctaagtccggtgatgtaggagtgcggcgcactttgtgataatagttggatgaagcgttgtctagcatgagcaaccgcgattggtcggcgatagcccacgtatccgtaagcattttctgatacagattccatcgttcgggatcattggctccctgtctcatataatcgagcatatacttatatgaagtttgcagctgttccaatcgggtacgtaaatcccagtcagagcattgccacaacagggattccaattgtatcaaggcttccttaagtcttctatcttcaagtaaggaatatatatatgcgtattgttcattaattgttttttcgttcataatttgatcaattatttatttctttccatctacatggaacagtgcaaaaagaatgccaaaaaagaaaatcaacgtattaaccttcattataggttataaataagggcaactcttttcacaaagaactgcccttcaagaatgttgaaatcttatgtgaatttattcttgaatagcggcgatacccggaaggatttttccttcgattgcttcaagtaatgcgccaccacctgttgaaacgtaagatacaccgttggccagaccgaacttgttgacacaagctacagagtcaccaccaccgacgagtgagaaagcaccgttcttggttgcttcaacgattgcttcacctactgtacgtgaaccgtgagtgaagttgtcaaattcgaatacacctgtaggaccgttccaaagaatagtcttagatcctttgataacgttagcgaagatttcttcagtcttaggaccgatatcaagaccttcccatccatcaggaatttcgttaaccggacagaatttagtatttgcatcgttagaaaaagcgtcagcgattttagcgtcaacagccaaaaccaggttcacacttttttctttagccttcttaatcagatccaaagccaagtcaagtttgtcgtcctcgcagatagagataccgattttaccaccttgcgctttagtaaatgtataagtcataccacctgcgataatcaagttgtctaccttgttcaacaggttttcgatgatttcgattttagaagaaactttagagccacccatgatagcagtgaacggacgtttgatatcgttcaatactttatctacggctttcacttctttttccatcaggtaaccgaacatcttgttatcagtatcgaaatatttagcgatcaatgccgtagaagcatgagcacggtgagcggtaccgaatgcgtcgtttacatagcagtcagcgtaagaagccaatttcttggtaaattctttctggctttcttttacagctttctttgcagcagctttctcttcgtcagttgcgtcttctgccaaacctcttggtttgccttcttcttcagcatagaaacgaaggttttcgagcaacagcacttcgcccggttgcagagcagcagctttcacggcagcttcttcacccatacagtcgttagcaaactgaacttcaacacccagcaattcagacaggtgtttgatgatatgtttcaaagaaaatttatcggcaacgcctttcggacgacccagatgagagccaatgatgatgcttccgccgtctgcaaggatcttcttcaaagtaggaagagccgcacgcatacgggtgtcgtctgtgatgttgaagttttcgtccaagggtacattgaagtccacgcgaacaaatgccttttttccggcaaaattgaatttgtcaattgtctgcataatactctatttttatttaaaagtgtttttaagattcttcgttaagaacgaccgcaaagttactatttatttcggttctccgctattaaatcgttatttattcttggcttttgattcctcttttgtaactttataggtgttacagaaatatttgcatatcatttgcaaaccacaggtagcacatttgggagtacgtgcctgacaaacataacgaccgtgaaggattagccaatgatgggcgatagggatcagttcttccggaatattctttatcagttctttttccacactaaacggagtagtgcaactgtccggcactaatccgatgcggtggcttacccggaatacgtgtgtgtcaaccgccattgccgctttattgaatactacggactgaatcacgttggccgtcttcctgcccacaccgggcagctttgtcaagtcttccagattatcgggaacttggctttggaagtcattcaccagcatttttgccatgccgaccagatgtttcgccttgttgttcggataagatacactccggatatattcaaaaacgacttcgggagtggtggctgccaaagcctccggagttggaaaatctttatataaagtcggagtaatcatatttacccgtttgtccgtgcattgggcggagaggattactgcgatcagcagttcgtacggattgttgtaatgtaattctgtttcggccacaggcacgttctcctgaaaccaggcgatcactttctcataacgttctttctttctcatcgtagtttgtttttatggtaatgaggcgttactttgattttaaaatagatggcggaaactaccgtcaggcaggctccgaacagataggctttgtcaaatgtgctgatttccgcaatatatcctcccgtcagcataccaataccgattcctacatcccacgaagtaagataggtggaagtggccgtcccccgttggctgttgggggccaggttgacaaacagcgtattgaatgccggaaacatgatcccgaagcctacgcccatcagtagtgcgacaccgaaaaacaggattgtgcaggccgcttcattccattgaatcagatatacgcaagaagctaacagaaagaaactgaaaatgacaagatacagtccggtggctattatttgtgttattttcccccgatccaccaacttcccggagaatatccgggagatagccataccgatagccataaaagtgaagaagaatcccgtttgcgtgtttattcctatctgacgggcatacatggctacataattggtagtcatgccgtaaggaatagaaagcaacaacaggctaagtccggcaggcaatccttttaacaagataaaccggtcgagtgaaataggttcccgtttcaccggaggtttatagggtgtttttactaaactggcggaaataaatcccaatacacatgaaccgagcgcataacagaatatcgtagcaaaagagactcccgcgtcatgcaggaataatccgaacatcggtccgatagacatcgctgtgttgtttgtaagtccgtaatatcctaaaccttcgcctctgcgtgaagagggcataatatcgataacgactgtatttccgcccactgtaaccatcccgaacgagacaccgtgtataatacggaatatgataaataaggtcagtgaaccggcaatcagataaccgccgaacatcatcataaagataaaataagcgaaaagatacagcggtttgcgtgcaaatgtatcaagcagataaccggaaaacggacgaatgcaaagtgccgctactgtataacaggaaagtacgatgccaatgatagaggtccctgcctggaaaaactcggataaataaaacggcaaaacgggaatcagcagccagaaaccgaagtagagcagaaaattggctgccaagatgaaacaataactaggagtaatgagtctatcctttgccataatgaatgtatttgtttcaccgcagaggacgcagagtctcacggagtttttctttctaatgactttctatgaagaacgagccgtaattgatacggctgaaataagaactctgtgtcctctgcgtcctctgtggtgaaatctaaatttagtaagcgctttcgaattccttcaggaagcgtgtgtcattttcagagaacagtctgaggtcgttgacgcgatattttaagttagtgattcgttcaatacccattcctaaagcataaccgctatatatcttgctgtcaataccgttcagctccagcacgttcggatctaccataccgcaacctaaaatttccacccaacctgtgtgtttgcagaaaggacaaccttttccaccgcagatgttacagcttatatccatttcggcactgggctctgtgaaagggaagtaagaaggacgcaggcggattttggtatcttcaccgaacatttcgcgggcaaaaagaagcaatgcctgtttcaaatccgtgaaagacacgttgcggtctacgtataaagcttccacttggtggaagaaggcgtgtgcacggtagctgatagcttcgttacgatatacgcgtcctggacaaagtacgcggataggaggttgtgtagactccattacacggctctgtacgctggatgtatgtgtacgcaaaacgacattgtgagacacttcggtattgttatcaataaagaaagtgtcttgcatatcgcgtgccggatggtcttccgcaaagttcatggaagagaatacatgccagtcgtcttcgatttccggtccgtctgcgatgttgaaacccattcgggcaaaaatatcgatgatttcgttcttcacgattgtgagcggatggcgtgtaccaagtttcacaggataagccgaacgggtcaaatccaatccgtcgcaaccgttgtcttggttttcaaactgctctttcagcgcattgattttatcctgcgctttcgttttcagttcattcagcctcatgccgacttcctttttctgctcagccggtacgttgcgaaaatctgccattaagtcgttaatggctcccttcttgctaaggtatttgatgcggagagcttcgagttcttcggcattggaggcgtgcaaggcttccacctctttcagaagttgttcaatcttagctatcatatttttgatatattgttattcagtttcttggtaaaaaccttgcaaagatataatatttatttcagttagtaaaatctatatagacgtttttatggagttccttactttaggttcggatttaaaatcgcatcctcgtaaggatagggagcgtacattttactatcatcccatgtacccgtcacgggcaccgcttcatttctctcgataccctccgctacttttattagcgggttctccttgcggtattcaaaatggtctttgtaccggtacatcctgaacatatccctggctctgctcgcaatgcctccccaatagtatccggctatttcccagccgtgctcatcgtaggcggcttctgccagtgcttcgggggtcatggtttccttataaaaattagtttcttgaccgtcagccctgttacgtaccttatttaatacttctatggcttttgtattgacttctcccgaacgccctgttgcttcggcataccagcaatatacctgcgacagccgtatcagttggagcgtcttttcgcctgccgcattcaccagagcgggattggtgtaatcgaactccgttccacgtacagcaccttccaccgttttcatgaaaacaggtgcaaccacttcgcgggaaggtggatcggtgtcataccaccagtcatgtagctcgccatcgctcaatatgattttaggaaagtaagtggcatctttgcgcggtccttccggaaaagctttccagaatttgatttctccattggtatctccccatccgccttgtgccatatcctgaaggaagtcggtcaagggagcggcttgatttgtctggtcccggttatagtagatacccagcagtaactctttattcttattattatattcccaagaatatacctggctgtattcatccagcagtgcataattataaatgtggttctccacaccgtcgattacttcttttgctttgcctgccgccagtttataatattccgttcctttgttgagcggccatcctgccatgcacatatacacgtatgccattgtcgctttcactgctccttcacttacggcgatatttattccgtttctggcataaggctctttggtgtaatttgcaggacaatctgtttctgcaatcttcaggtcggatagaatcaatttataaacttcttcttctgtttgcaaaggagcgttgtaattgatttcctcttccagcatgataggcacttttccccacgttgtcaccagatagaaatacgaataggctctccaataatgtgcctgtccgatagcagccttaatttcttcctctgatacgtcaggggtgcgtccagcattgttgataatgaagttggcggccttgattactttgaaacgctgttcccacatactggacaaccatgaattattatctttcacatcaaactggtcatgttccctaagcggctgtttgttgctggaagggtgggtggaaatatcatcaccggctaggaagttagtaccgcaaagattattgcttgcctgtgaacttgctatcacggagtatagtgcggtcagtgaagcatcaagatcttctttgttgctgaagaattcttctgagggcaactgtcctttagggtcttcggtcaggaagtcgttacacgaaaccaagcatagacccgcccaaacgaatggcaatgtctttttgatatacttatatgttgttttcatcttgttctttatttataggtcaatggttaaaatctgattttggcgccaaaagttattgttcgtgggatggggtacgcaccataatccagaccgtcatagctggtataaacctccggatccattcctttgtaacgggtgattgtaaaaaggtcttgcgcgcttacggataattgtatacttgcaaatttggcaacccgtctcggaatgcgatacgaaatgctgacgtttttcaatttgacgaaagaagcgtcttccagccagaagtccgagttggcgtaattcttactttcggtattggtgaggctcggataagctgcttccgctttgttgcttacgtgatcccaacctttgaaatacgcatcccgcagcgtgacgaaacgtgaattcccggtcattgaggcggccgtgtagcggcttatattcaggcggttgtatccggtggcggcattgaagaagatgtttacagtccagtttttccaactgattgtgttgttccaccccattgtccatttcgggcttgcctgtccttttactaccaagtcgtcggaagtagggctggtagtcagactaccgtctgctttctgataaaggttggcgcctttgtcgtcgaatcctttccattgatatacatagaaagatcccatcggataaccgggcttcataatttgcatcgcaccgcccaaatcgctgtagttggctgtcagtacgaagtcactgccggcaaggtcggttacttcatttttcacataagcggcattgaaaccggtctcccaagtcaccgttcctttcaccgggaaggtgttgaccgagaattcaactcccgtgttcttcagttcaccctgattcacccaatacgtacctccaccgttgtatttgggtacttgtttttggaagagcaggtctttggttattttcttgaaccaatcgaatgtaatgttgaacccgcccaagcttaaatctactcccaaatcatattggtaggttttttcccaagtgatatcgggagtagggaactggttaccccaataccctgtgtaagcattggaagtaccccagccgtaagttgcgcccgataacattcccagcgtactgtatgcggcaatgtcctgattaccggtgacaccgaaactacctcttaatttcaattgttccaatatatgttggttgctcatgaacttctcctttgctatatcccaagctactgctgcggatggaaaatatccccatttattgtttccttgaaatttggaagagccgtccgctcttaatgcggcagtgatgaaataccgtttcttgtagtcatagttggcacgtatgattcctgaagcaagagacgcttctgtgtacgagttacttgcatttcttatggcggcattggcgatattccaatatcctacgctctcattgttcagattcgaaccggtaccttgcaagcccgtatcccacgtgcggctgatttcccatacggccattgccgtaacgttgtggtcaccgaattgtctttgccaggtcaggttattggtattctgccaatagttatgcatattgctggtgttgttcatgctgttgattgcaccgggagcttccaatttcgatttgaaagaataggaagggctgtggtcgtagtcgtatccaccttgtacggagaacgtaagccctttcattatcttgaataataaggtcaggttagcattgaggttataactgtaactgtcactgtagttaaccatcagctcaccgtatggattcgagccgttggcgatgttatacgggtctctgttgtatatgccggtttccggatctttcatttccatcgtaggggagaagttggtgatatgaaaccagttggcaccgtcgttatgcttatgcagactgctggcgttcatcttggcggagatagtcagccagggttttacatcagcatcgatgtttgcccggataccataacgtttgtaatccgtcctgatagtgacggcttcctgatccagcatatttccggaaataagatatttcactttggcgtttccaccggagatgcttaatctgtaatcctgcgtgataccggtgtgagtgatgaggtcagcccaattgattccttttgtcccgtttttgtaggcttcgaggtcttctgctgaaatcgtagatgaaccgcgtatatcattcagtgccgttgcatattcatatgcgttcagtaaatcatattgttttctcactgtggaaagacctacggaagcatcgaacgtaatactggcttttccttcgctaccgcctttggtggtgatcaaaataactccgtttgaacctcgcgaaccgtaaatagcggtggatgaagcgtctttcagaacttccatcgattggatatccgacggattgataccgtccagcccgctggaagagatgattccgtctatcacgtacaacgggtcactacttttattgatagaggtagtaccgcgtacacgtactttcatgcctgctccgggcacaccgcttgtcgcagtaacttccacaccgggtgtccggccttgaaggatgttttccacccgttttaccggctggttcttgaattgcctggtcgacacaccggaaacggagcccgtcaaatcgcttttcttgactgttccgtatcctaccaccactacctcttctagtagctgattgtcttctttcagtatgacatgaagggctgttctttttcttatttttatttcctgcggatgatatccgatataagaaataacgagggtggatccttggggaacactcagtgtaaatttgccgtccatatcactcgttgtccctgtcgtttcttctccttttattaatacagaggcaccgatgatggtttctccttgttcgtcataaataattccttttatggttctgttcccgccttcatcggtttcgtcttcttgcacttccgtcaccggctctccctctgtcgaggcttccatcggcatgcttgctgcttgtgaaaacagatgtgatggtaaaaggaacacaaaaagaatgcttaacaaccgtttgctttttcttgtcactttcatgtttatttaaatttagattttcttatagggattgaattctgttaataattagcaagcagcgtgccagaccattctatatactgtccggataaaacgtaaataattgatttttattgttatagtatttaagaaataaagtgtgtttttttagaagtgtggaattgcagactgtggaattgtgtaaaaattccacagtgtgatggagtatattccccattgttttatcggtacgcattgaaataattcctatctttgcaccgttatataccgaaaatccggcaacttatgaaaaagattgttttcactcttctaattttggctttttcttttcgccttgcggcccagacagactatttggagccggtgcgatctttctctacttataaaggcgagttgggtgaatattatcgtagtgtattctctttgttaaatacaggttttcagaaacagccttatgcgcgttttacagctattccttccttttcgcccgaatatgccatgtcggtagaaaagaagaacggacgttattttctgatatcgaacacgctgtcacgaacttattggcaggcggagaaaggaacggtgaaagtggagacgaaatcagttgccgtcagtccgtcgctttatcggtctttgggagctatctttcatatagccactgagcagatacaggatttggatggttccagtgccggtttggatggggttgtctattatttttcttccaccaatgagaaagggaaagagcggatgggaaggaagtggtctccggaaaaaggaactttgatggagcgtcttgtgttggtttgccagtcggcttatatgttgtccaaaggtggaaatatatcggagcagactttggcagaagaagccgcttctctgttgaaggccctgcaacaacgcagcaaggaagcttccgatgcatataaacaaccgatatatgttggaatttatcaggtaggtccccgctcgagagcactttctggaaaacggatagaagagttagctcattttccggatatgactcctgaagaatatattgccggacagatggtgtatccggtcgatttattggagaaaaatattcccggatttgctttgtgcgagtttactattgataaagaaggagttatacttcgtccacatatagtacggtctacgcatccggagtttgcggaagaagctctccgcattgtaaaaggaatgccgaagtgggctcctgctcttgtagaaggtaaaccgacagatagtaattatactctttatattccttttcgaccgcagaattatcgggcgaaataaccttccttccctagtataaaaacacaaaatcctctatcacctatcacctgttgctctgaattcctttattcatcgtgctttcaataaggtgataggttgtgtgtaatctatcaccgcacctgtcacctatcaccgctttctctgaaaacagtaatcggtagaatgtctttcttactatttattattttgtttcatagctatttgaaacattttgtttaacggtggaaaacattatgtttcacgctgctaaacactttgtttcgcactgtcgaacactttgtctcaagccgttgaaacacgactctactccgtatgcttgggatgaattatatggttggtttaggtgaatcgtatggttagtttaagtgaaacgtatagtcgatttaggcaaatcgtatgatcgtattgggtgacagatgttttggcaagatagttactcatgtataatcagattcaaaaaatcattaaaacaaagaacttttcttgttcttgattgtcttatgaccataaatatataaaatgagaacttatggatgatatgattaacagacacgattcgattgcagaagaaaatatcgaaccgaatggtcgtccggccacgaatgattttgaagaatggagcagtgaagtttctgaccgtgcagacaatgttttcaagaatgatacgaaagacggtcccgacaaaggccgtaagaaacgtataaaggaaatagatgaagtgataaagaaggaccttgaataaaggccctttttttgataaaaatctgaatcctgtaatttattaacattccaatattggaaaggaagtggagcgtatcggactcgaaccgatcaccttaacactgccagtgttacgctctagccagatgagctaacgccccttttttctcttatatgataacgtttgtaaacgaatctcttttgttgccgcaaatataatgcaatattctgaaataattgctatgtttgcggtaaataatctattagaaggaaaaatatgttgatttataacaccacttttcaagtggacgatgatgttcacgataattttttgatttggataaaagaatcttatattcccgaggtacagaagcacggagcgctgaaaacaccacgtatttgtcgtatattgagccatcgggaagatgggagcgcctattctttacagtgggaagtagagagtagtggattgttgcaccgctggcatttggaacaagggatacgattgaatgacgaactgactaagatatttaaggataaggtaatcggatttcccacattgatggaggtgatagagtgattcaaccggtaaaagagaagataattctggggatagaccccggtacgacaatcatgggatatggagtgctgagaataaaaggaaccaaaccagaaatgattgctatggggattatcgacttgcgtaagtttgccaatcattacttgaaattgcgccatatccatgagcgggtgctgagtattattgaaagctatttgcctgatgaactggctattgaagctcctttcttcggcaaaaatgttcagtctatgttgaaattgggacgtgcgcaaggagtagcgatggcagcagcgttaagtcgtgatataccgatcatcgaatatgccccgttgaagataaagatggctattaccggaaacggacaagcatcgaaggagcaggtggcggatatgttgcagagaatgcttcatttctcaaaagcggatatgcccacttttatggatgcgaccgacggtctggctgccgcctattgccatttcctgcaaatgggacggcctgctgtagagaagggatatagtagctggaaggattttatagcgaagaatccggataaagtgaagtaaactttaacaataaatcagattacgaaaaatagtatcataggagagcttgagatgaagataggaattaattcaataataggagtgactacagtggcaacagtgatgagttgttcttctgcgaaaaaggaatatgcttccttcgagttgtatcccgtccgtacgggaagccttacggaaatggaatatactccggaagctacgaaattcaccctttggtcaccgacagcagaagaagtgcgcctgatgctttatgatgaaggtgaaggaggtcatgcttatgaaacagtgaagatggaacttggagaggatggaacttgggcaactgtggttaacaagaatttgctcaataagttctatactttcaatgtgaaaatcaatgataaatggcaaggggatactccgggaattaatgctcatgctgtcggggtgaatggaaaacgtgccgctattatcgattggaaagcaacgaacccggaaggatgggagaatgatcaacgtcctccgctgaaatctcctgccgatatgattatctacgaaatgcatcatcgtgatttttcggtcgattctacttccggaataaagaataaaggaaagttccttgctttgaccgagcatggaacgatgaactcggataaattgctgacaggaatcgaccatctgatagagttgggtgtgacgcatgtgcatcttcttccttcctatgattatgcttccgtagatgaaacaaaattggatgaaaatcagtacaattggggatatgacccgttgaattacaatgttccggacggctcatattcaacagatccttatcaacccgccactcgcgtgaaagaattcaagcaaatggtacaggcgttgcataaagccggcatccgggtgattctggatgtggtttacaatcatacgtttaatacggcggagagtaattttgaacgtacagtacccggttatttttatcgtcagaaagaagacgggacattggcgaacggttcgggttgtggaaatgaaacggctagtgaacgtcctatgatgcgtaagtttatgatagaatccgtgctttactggatgaaggaatatcatatcgatggttttcgcttcgatttgatgggagtgcatgatattgaaacgatgaacgagattcggaaggcagtggatgaagtggactctactgtttgtgtttacggagaaggatgggctgctgaaatgcctcaatatcctgctgattctttggctatgaaaaagaatgtggcgtatatgcccggaattgcagtcttctcggacgagtttcgtgacggactttgcggttctgtttgggagaaaggtaagggagcttttcttgccggagtgccgggaggggagaacagcgttaagtttggtattgtgggagctatcgaacatccgcaagtacgctatgattcggtgaattacagtcggcaagcctgggccggacagcctacccaaatgattagttacgtttcctgccatgacggtttatgccttgttgatcgcttgaaagcaagtatgccagaagctactcccgagcaactggtccggcttgataagcttgcgcagacggtagtcttcacttcgcaaggtattccttttatctatgcaggagaagaagtgatgcgcgataaacaaggggtggataatagttataagagtccggatgcagtcaatgctatcgattggcgacgcaagacgatgaacggagatgttttcatgtattataagcggctcatagatctgcgtaagtcccatcccgctttccgtatgggagatgcggaaaaggttcggaagcatctggagtttcttccagtggaaggacaaaacctgattgcattccgcctgaaggatcacgcgaacggagatagttgggaagatattatcgtggcctttaattcccgtatgacccctgcgcgtttggcagtgcctgccggaaagtatacagtggtgtgtaaagacggggtgatagatgttcgcggactgggaacacagacgggagcggaagtgattattcccggtcaatcggctttgattatgtatcggtagccagctttttcagcttgaatgtaacataacaacaactatttgtaacatatgcatacgatgatgtaacagacgagaaacaatctgaatcgtaattcttcggtggagggcaagaaacttcttaagtttgcaacgtgatagtcggcaagattcgtcattttttctaactatcgcgaaataactaagaagtaaaagaaaagacagaatgaaatggactctacaatgaaaatgaatgacgctaaaggtttccatttgggatcctcttgtaggggcttttgttgataagcacaatcctaaactcggcaaataccgttcataccttatattgggagggattccattgacagatattttctacaaagcgggtatggctcttggaggtgtggtgccgggacttgtcatggcatttgtcggatttgatcagactaatgaggtgtcacaatcaccttttgccgaacaggggatactgtggcttgtagctgttattcctgccttgctgcttctggtggctatgttcattatatctaagtatggactagaggacgatgtgattgataacatcaatagagagatagaattacgccacaaagggggcgaataaataaaagaatatttacttaaaaattgttgtatataaaaacaaacggatcaatatttttttgcttgtgatggcggcatttcttacttatggtggtgaagtagcttttgcgcaaaacaattccgttggcttttcaatatgcacatgaggccgatccggattcttggtgtaatgattggccgatggctgggcgtaactattatatctattttggtggattgtggggcggtcaactccaacgttacaggaataataaggcgttggaatctgccattttgccggaaggtatggaagaagccttgcccacacgtgtagcccgtttgagagaggacatgatggagtttgccgaagaaccacgcggtggtgataatcgataaaaatgggaaaccgttgacagccggagatacggccgctgttttttttgaagcttcgtggatgcacaagtataacgggagatattatttctcttattctacgggagatacccatttgctttgttatgcgataggtgataatccatacggaccattcacttatcagggagtcgttcagactccggtagtaggatggactacacatcatgccattgttgaattcaaaggaaagtggtatttgttccatcacgattgtgtgccatcaggagggaaaacttggttgcgcagcatgaaggtttgcgaactgcaatatgatgcggacgggaaaatcattactattgacggaatggatgaataaccccgttggataaacaaatcggttgtatgaatggaaaaatgttcgtgataggtcttgttttgctgtaaaattgttacctttgcggtcgataattaaacagaatataagaatatgagtcaaaatacatttagcatggcggggggcgtagcacgcaacccgcttgtgcgtttagccaaacccatcacgtcaactatcggagcgaatgaacatatagctattgtaggtcctaatggtggtggtaaaagtctttttgtagatactttgataggaaaatatcctttgcgtgagggaacgattgaatatgatttttctccttcggccactcagactgtttatgataatgtgaaatatattgctttccgtgatacttatggggcagccgataccaattactactatcagcagcgttggaatgctcatgatcaggatgaagtgccggatgttcgtgatatgttgggcgaaatcaaagacgacaagctgaaaaatgaattgtttgaacttttccatatcgaacctcttcttgacaaaaagataattttactttccagtggtgaactacgtaagttccaactcactaaaactctgttgacagcacctcgtgtgctgattatggataatccgttcatcggtttggatgcacctacccgcgaattattgttctccttgcttgagcgtttgacaaagatgtcgtcggtgcagatcgtcttagtcctttctatgctggatgatataccttcgtttattactcatgtcattcctgtggataagatggaggtctttcctaaaatggcacgtgaggcttatctgaaagcttttcatgacagagatacggttgattcttttgaggagttgcagaaacggattatcaatttggcttatgacggaaatacctacgactcggatgaagtcgtgaaattgaataaggtgagtattcgttatgatgaccgtactatcctgaaagaattggactggacagttcgtcgtggtgaaaagtgggcattaagtggggaaaacggagcgggtaaatcgactctattgagtctggtttgtgcagataatccgcagtcgtatgcctgtgatatcagtcttttcgggcggaaaagaggaacgggagaaagtatttgggaaatcaagaaacatatcggttatgtcagtccggagatgcatcgtgcctatctcaagaatttgccgactattgagattgtggccagtggtttgcacgacagtatcggtctgtataaacgtcctcaaccggaacagatggctatctgtgagtggtggatgggtatattcggtattgcagatttaaaagataaaccattcctacaactatccagtggagaacaacgtttggccttgctggcaagagctttcgtcaaagacccggaactgctgattttggatgaaccgcttcatggattggatacctataatcgtcgccgggtaaagaaagtgattgaggctttctgccgacgcaaagataagacgatgattatggtgacacattatgaatcggaacttcccgatacaattacaaaccgtattttcttgacgagaaaccgatgaaagaataaaatcagcatttttaggtattggcaactccttcttctttggtgaactttgtagcgaaacaaactgttctatatataactaaagaagaaaggagactaataaaaaatgagaaaaatagtattgcttcgtcatggagaaagtgcttggaataaagaaaaccgctttacgggttggacagatgtcgatctgaccgaaaaaggaattgccgaagctgagaaagcaggcgagacattgaaggagtatggcttcaatttcgataaagcctatacctcttacttgaaaagagctgtcaagacgctgaattgtgtacttgataaaatggatctcgactggctacctgttgaaaaaaactggcgtctgaacgaaaagcattatggcgatttgcaaggattgaataaagcggaaactgccgggaaatatggtgaagaacaagtgctgatctggcgtcgtagctatgatattgcccctaatccgctttcggaaagtgacttgcggaatgcgcgttttgactaccgttatcatgaagttccagatgccgaacttccccgtaccgaatcattgaaagataccattgaacgtattatgccttattgggaatcggatatatttcccaacctgaaaacagcccatactttattggttgtggctcatggtaacagtctgcgaggtatcatcaaacatctgaaacatatttctgatgagaaaattgtaaaactgaatctgcctactgccgttccttatgtattcgagtttgacgagaacctgaatgtctctaatgattattttcttggaaatgcggaagaaatcaaaaaaatgatggaagcggtagccaatcaaggaaagaaaaaataaagtgttgtatattaaaaaaagtaaagttatgagtaaagtaattgatttgttaggagataaagccggatattatctggatcacacttgtaagacgattgataagtctttgatttatgtgccttctcccgatacgatagataaaatatgggttgattccgaccgtaatataaaagtgctgaacagcttgcaagctattctcggacatggacgtttggctaattccggttatgtatccattcttcctgtcgatcaggatattgaacatactgccggagcgtcttttgctccaaatcctatctacttcgatccggagaatattgtaaaattggctattgaaggcggttgtaatgcggtcgcttctacattcggcattttgggagcggtggcacgcaaatatgcccataaaattccgtttgtggttaaactgaatcataatgaattgctgacctatcctaattcgtatgatcaggtgatgttcggcacagtgaaagaagcatggaatatgggagctacggctgtcggcgctactatctatttcggttcggaacaaagtcgtcgccaattggtggaaatcgctgaggctttcgagtatgctcacgaattggggatggccactatcctgtggtgttatctgcgtaatagtgattttaagaaagatggtgtggattatcatgctgctgccgacttgaccggacaggctgaccgtctcggagttacgatcaaagcagatattgtcaaacaaaaacttcctacgaataatggtggtttcaaagcaattggtttcggtaagacggatgaacgtatgtacacccaactggcttcggaacatccgattgacctttgtcgttatcaggttgccaatggttatatggggcgtgtcggtttaatcaattccggtggtgagtcgcacggagcttccgacttacgtgatgcggttattacagccgtaatcaataagcgtgccggaggtatggggttgattagcggacgtaaagcgttccaaaaatcgatgaataaaggtgtcgaattattgaatgctatccaggatgtttatcttgatccggcaattactattgcctgattcctgattataggaaagtgaatattccggtgactgtgtcaacagtcggtgaatattcacttttttcgtttctctttgtattgtgtgggagtttcccctgtatattgtttgaaggctgtactgaaataacgtgaagtggtgaagccgaccttctcagctatttctgtaaatgtcatatccgtttcggtaatgtatgctattgctttctccattctgaacttattgatataatcattagcccccatatcggtcagggctttcaacttattgtaaagtgaagcccggctcataccgatttctttgcagataaaggctatatccaaactgctgttgtccagattttcttgaatgatcttattcaacttgagcaggaaggtctcgtctgcctggctgaacgtactttcttccggtgcagggattactccggcatttaggtatcttttcttggtagactcacggcttttcaatcggttacgaatgatttccataagcatttctatttcaaaaggctttgtcagataggcgtccgctccattcttgtaaccgcttaattgactttgctggtcgtctcttgccgtcagcagaataatagggatatggctgattgtgatatcttccttgatacttttgcaaagttcatatccattcattctaggcatcattacatcgctgacaattatgtccggagtgtgacttctgataagttgaagggcttctgcgccatccgaagctatcactacccgtttaaagtattctcccaacgattttttcaggaaatctgttaaatccggattgtcgtctacaactaaaactgtatatggagttgtatcgaaatcatcattgccgggtgcttgttcatggctgtcgtcactcatcagttcgttcagataggcttttggttgacagatgatttcttctgattctcgtctcaacggcaattcaatgaagaaagtcgcacctgcttcctgattgtcgtatgcgccaatggaaccaccttgcaattcaaccagaatctttgaataagacagtccgattcctgttccgttttgttctcccgtgccttgatagaagcgtgtgaaaagtttttgtgtgttgacttgtttcaaaccgcttccttggtcagtgatagaaatacgtactctgtctttttcaggaagcaattctgatataatagtgatttccgtattctccgggctgtgtttcaatgcattgataagcaagttactcaaaataatttcgcatttgtctttatcgaaacttaccgtttctatttgcggatccaattgatatcggatacgtacgttcttggcttctccttcactgatgaaatcctgtgagatgtgttctatccattggttgaggaagtgaggctgtatctgtattttactttcgcccacttccatctttcgtacgtcaagtaccatattaatcaggttcttcatccgttgtgactgcctgtaaatcgcctttataggaagatattgcggctcttcgggagagagtgatttcaatatccggctaagtggggcgtgtatcaatgtcaacggtgtgcgtagttcgtggctgatattaatgaggaaacgtactttttcttcgtatacctgttgctcatgctctttcatcgcccattttaacttttcttctttgcgcttcaaagtccttctgaaagtctcgataataacgacagtaatgagaaccgcacagctaaggatgaaccaccatgtgcggtaccagggaggaagaatagtcaatgccaatacttgttgattgggaatccaactaccatcttttgctgtgcaggacgctgtgattttataacttcccggaggaagtgaacgtataaccaattcagggttgtatgattctatttgttggtcgttcagtccttctatttgatatcggtatactttctgtcggaagatgtctttttcttttgacatgatccgaatgattatattgctgttccaaggagcggaaatactcgttggattattgtttagcttatcattgacggactcaccattgatgatgacatccgatagttgaagttggggtatttcggtagtgattaagggtagggtactattgatgtgtaataatcctttcactccgcccatatagatattgccttgtgaacttaacaaacagggtttggataggtactcgttttgaatgacaccgtccgattcgccgaaaagcacaaatttctgttctttgattagccaggcgaacagcatattattggttcctatccatacttttccttgttggtcacacacaatcgatgtgacttccgagaaaagggaggtagatatgggagtttgtattttttcatcgggattataatgaaacagcccgtaattatttcctatccagaaatgcccatgttcatctaatgaaacagaattgataatagtgtccttgtggcattgatacagaacttccaatcggttggtgcggttatccaaccgataaatgtgctttatgtcgttcagataagtataattcccataatttgttattggtaagaaagtgccgataatgtccagtccttcttgttcggttgcaatattgaaagtgtgtttcttcaagtcatattgatagacatggtctccaagtaacagaatgctatgagggttattggaaaataaattgactgtctttccccgctttccgagacgcatggaagtttccgaatctataatcatgaatggcgttttcttgcctgttgtcgggttgaatacgaatattccttttgagaaaatggaaactaacagattgccggaagtgaatggacaaatggaagcgattttgtcttcccaagtggatgagtaatgggtgaatttctctgtgataggattaaagagattaatacctccaccgtctgtgcccacccagatgcggtcgttcgattcctgataaagactgagtacggtattattacttaatccacgattgctgcccgtcaggacttccgtataggttttcatggaaacttcccggatattgatcaatccgttgcggatacttcctgcccacatattattattcctatcattgtagagacaaaagatagaggtggcgggaagtgaatagttatcacctccgggaatgtgttccaacaaggataaacgtcctgtttcaggttcaaggatattgataccgcctccgtctgttcctatccatatttttccttcccgttcggcaagacttaaaacgacgttgttacttaggtcggaattgtgagtagtataggcttttaccagttctccgttatgggtgaagcattttattccttcattgtaaggggcgatccatattctgttttgtgaatcgatcagcatattcatgatttcctttccgcaatcgaaaggcggaaggcgatgctttcccgttttcagatccagtaaagcaagaccttgccaccggctgcaacaaagaacagtatgttcgttccataggcttagtaaagagatattaaaattattccctttattcaacttttgcagaaggcgaagagaagaatcccgataactataaaagtatactttgtctttagaaccaaacaataccccgtctttggtcaggcaggttgaataggcgataataggattacctttttcatccgtaggtaagaagaagtcatcactttgacgttgatagcgggctattcctttgtcggtcagaatccaaatattgctcatttcatcttctgcaatctgatggattaagttattgggaatcgaatgaggattgtttggggaatggacgtatttctttagctcatgtccgtcatatcggcttattccagccttcgttcctatccatacaaatccctgtttgtctgtcaggatacatcttacggctgaagtcaccccatcttttaaggagagctgtttatagtaataatggctggcttttaggggcgtgacaccggtaaactgcataatagctgtcaaacatagtaggacaaagatttttattctcatgagattaggtcagttaaatgaaagcaaaggtagtattatttgtttataattcctatctttgctcgaaaatatgtaactatgattaccgaagaactgcagaaactttatcagtcatatacgggagttcccgctgagaatataacagaattaccttcctccggctccaatcgccgttatttccggctgacaggagcacaaacactgattggagtatatggaacttctgttgatgagaatgaagcttttttttatatggcggaacattttcgcaaaaatgggcttcctgttcccgaagtacacattgtgtcggaagataaaatgtattatctgcaagaggatttaggagatactttactttttcatgtcattgagaaaggacgtgctaccagtgtattttccgaagaagagaaagagttgcttcgtaaaacgatccgtctgttgcctgccattcagtttgccggagctgacggatttgatttttcccgttgttatccccaatcggaattcaatcagcgttccatactttgggatttgaattatttcaaatattgtttccttaaagctaccggaatggagtttcaggaagataagctggaggatgatttccagaaaatgagtgatgttttgcttcgtagttcttccgctacttttatgtatcgtgattttcagagtcgcaatgtgatgataaaggatggaaccccttggcttattgactttcaaggaggacgaaaagggccgttttattatgatattgcttctttcttgtggcaagccaaagcaaaatatcctgatagccttcggaaagaattgttacaggaatatatagaggctcttcgcaaatatcaaccgatcgatgagtcttatttttatagtcagctccgtcattttgtgcttttccgtactttgcaggtgttaggggcatacggttttcgcggctatttcgagaaaaagcctcattttatccagagtgttccatacgctatcgcaaatttgcgcgagttgcttaaagaggaatatccggaatacccgtatctctgcaaaatgttacgtgaattgaccggactgaaacagtttacagatgatttggagaagcgtcaactgacggtcaaggtaatgagctttgcctataaaaaaggtattcctgatgatccgacaggtaatggtggaggttttgttttcgattgtcgtgcagtgaataatccaggaaaatacgaacgttataaggcttttaccggattggatgagcccgtgataactttcctggaagaagacggtgagattcttcgttttctcgaccatgtttacgctttggtggatgcttccgtcaaacgttatatggaacgcggattcagtaatttgtcggtttgcttcggttgtaccggaggacagcaccgttccgtttattcagcgcagcatttggcggaacgtctgaatagagagtttggggttaaagtagaattagtacatcgcgaacagaatataaaacatacatttgaagcaactatatagaagatcgttatgaaagcaatgatatttgcggccggtttgggaagtcggttgaaaccgctgacggatactatgcctaaagctcttgttcccgtagccgggcgtcccatgctggagcacgttattttaaagctgaaagcattcggctttaccgaaattgtaattaatattcatcattttggcgagcaaatacttgaattcctgaaagtgaatgacaattttggacttactatccacatttccgatgaacgtgatgtgctacttgatacagggggaggaattcggaaagccagttctttttttgagaactccgatgagccttttcttgtacacaatgtagacattctttcaaatgtggatctgaaagaactttatgattatcatttgcagactgatggtttggctactttattggtaagccaacgtaaaacttcacgttatctgcttctcgatgcggagaagagactttgcggatggataaacaaggatacaggtcaagtgaaacccgaaggtcttcactatgaacaatcattattccaagaatatgcgttcagtggcattcatgtactttcacctgctatattccaattaatggaagttcccctgtgggaaggaaagttctctattatggatttttatctcttcacttgtcgacaaacgaacttctttggttatccggtggaaaatctgcaacttattgatattggtaaaccggaaacacttgctaaggcagaggagtttataaggtctctcggcaagtaatattgttcgctgggacgaataacatgagcctggttaatttagtttttgtatttgtttgggattccaacatatttcttttacctttgttataatgaaaacagaaatagaaaaaggaggcgaacaaaatggcaagtaattatattcgtttcgattgggcgatgaaacgcttattgcgtaataaagctaattttgccgtactggaaggttttttgactacctttttaggggatcaatccttattcagaaattattggagagtgaaagtaatcaagaagatgagtacgataaatataatcgtgtggatttgcttgccgaaaactctaaaggtgagcttattttaatagaagttcaaaacaataatgaatatgcttatttccagcgtatgttatttggaacatctaagttggttaccgaatacataaatcgtggagaaggttacgacaaagttcgtaaggtgtatagcgttaatatcgtctatttttctttaggtagcggtaaagatgttgtatatcatggtaaaacggaatttcgcggaattcatcagggggatgttttagaactgactccattccaaaaacaaactttcaaagtggatactgtcagccaactttatccggagtattatatattgaaagtgaattatttcaatcaagtagcaagaagtccgcttaaagaatggatttactatctgaatacaggagacattcctgataacgctactgcaccgggattgaacgaggcacgccagcggttgaaattggatcggatgacaaaggaagaactcaatgcttattatagacatttggataatattgttattttgagagataatatattcacagaacgtgccgaaggggaaagaaataagcaaattgagattgcgcgtaatttaaagaaggcaggagtttcaatagatgttatttcacaatcttcgggattgacagtagatgaaatagagaagttataaaagtattactttaagtagaaataaaaaaagaaaaggcgggaatgctcaaaaagggtattttcgcctttcctattttgttttatatgcgtatccaaaaatgtctaaacaactcgtattatccgatgaaatggacgattttagacaaaattggaagaatcgtagctaaaatagaacacatacaatcttgaatcttctatacatttgtagcagagaatgacgatagaaagtcattcctattattaaaaggtaatcttaattattaaacttatgagaagcaaattcctatttttttgtctcttcctctttggaatgttgacagcttgtaaagacacaaaatgggtggatgttccagctggcactcctcctgaaggttcagttgttggaaaaccgggtgatgacgaagaaccggatgaaccggacccaacaggaaaatcatttattaattgttcttatatacgtggtgatttttttgagataaatcgaatttccggagcaagtatgggtgtttgtaatgatttgatttatctgacagctcgtccttatgctgacggtgacttgacatttgatctgccggtgaatgacgcagaacttacaggagtatcatatatgccttcttatgaaggtcgtaatggagtggtaaaatttgatggtgccggaaaaatgaacggtggagatggtttacttcattccccggatggggcttacaagaagtttacatttggtacttatctatatataactgaatgggtagatggtgcttatttatttaataaggtaaacaataactctaccattatatctttccaacttggtgcaactgaaggaaatttaagatttactattggaaattctacgagaactgttgtcaatgacaatttaaagccgggtgcttggcattatgtagcgataacttatagtggaggaaaggctaaattatatgtagacactaataatacccctacagaatttacgggttctctgcctgctgaaattcctaatactcgtgcagatttctttcttggagaaaaattcaaaggatatttggatgagacattcgttagcagtttggaagtaggtacgttgggtagaaatcctatctcttttgatactaatatttggaataatacaaaaacacttgcttattggaaatatgatgattctgcacagctcggaaaagattctcatacttgggctattcgtttagaacaaatacgtgctgcattaaatggacaagtaggagaccgaaaactacgtttgggtatcgctggtggtgaatggttgaagatggttggtaatgaaactgcgcgcactaactttgctaataatgttaagaatgttttggataagtataatatggatggggtcgatcttgactttgaatgggcttattatgctagtgacttaactaattacagcaaagccatagtaaaactgcgcaacgtattaggaaaaaatgtattttttacggtttccttgcatccggtttcttataagataactcctgaagcaattgctgcagttgattttatctctttccaatgttatggacctcaggcggctcttttttctttcgaacgtttcaaatcagacggtcaaactgctgttaaatatggaattcctcaaaataaattggtgatgggagtacctttttatggaactaccggaacagcgggtgaacaagttgcttattatgatctgataaataaaggtaatcttactaacacttctgtggatgaatggatgtataatggaaagaactatacactcaatagtcagactacaattcgccaaaaaacacagtatgtgtgtgagaatggtttcggtggaataatgagctgggatttggctacggacgtagatgtgacagatgataagtctttgttgaaagtggtgaaagaagagtttgattactatgctaatcctgccgtagaataacagtataatcttaattagtaaatataatattatggaaaaaaagaagttcgtgaaaaaacagggacgggttgttctttttctgatgctcctgttattgtttcctcttggtgcattagcacaacaaaaaatgataaaaggacaggtcgtggatgatagtggtgaggcgattattggtgcaacggtcatggtaaaaggcaacactggaggaacgattactgatattgacggtaatttttcaattcagggaaaagttggaagtatactttctattacatacgttggatacgctccgatgcaagtaaaggttactaagttggaaggaaataaatatgtgatgaaagaagatgccaaagtattggatgaagtggtagttgtgggtatggatacacaaaaaagaaatacgattacagcagctgttgctacgttgaaagatgatgccattgtcaatcgtcctgttacagatgtcacaagtgccttgcagggtaatattgcaggcttaaattttgctacggacgcagtgggaggtggtgtcggtggtgaaaccggtgcagatattaaatttagtattcgtggtattggttctatcaatggtggagaaccatacgtattggtagatggagtagagcagagtatgcagaatgtgaatcctgccgatattgctagtatcagtgttttgaaagatgcttccgcttctgctgtatatggtgcacgtgcagcttatggagtagtattggttaccactaaaagtggtaaaaaggagagggctagtgtcacctatcgtggaacagttggtttcagttcacctattaatatgccaaagatgatgaactcgttggaatacgctatgtataataatcagcaatatgataatggtggagcgtcttccggtttacagagaattccggataaaactattgagaaaattaaaggttttatgcagaatccttattctacagaatttccaggtattgaggctaatacttccggtgatgattgggcaggagcctattataatcagtatggcaatactgattggtttgattattattttaaagataagtctatccgtcattctcataacttaagtgtacagggtggttctgacaaggtaaactactatattggtatgggatatacttatcaagagggtttgctggatcaagtgcaggataatttgagtaaatacaatttgaataccaaattacagatgaagaccaataattggttacgatttaatttgaataataatattactttgcagatgattaaacgtccgatggcgaatcagacgattctatataataagattggtagccatcgtcctactcaggttactcagttgcctgttgattcagaatacaatttgccgagctggaatgaaatgttatatttgaaaaattctcattatcagaggaaccgtatttcagatgctttgtcactttctgcaacagtaactccattggagggatgggatatcaccggagaaatgaaaatccgttttgatatagaaaataacgatctgataatggaaaataaccagaagtatgaaactcctgtgggtacttttaaaccgggtgatgctactaatcaaagacaaggatttgcttatcctggtattagctggaagaatatgtatttcggatcttatactcgtgggagtatgttcaattattacttatcacctaatgtttcgagttcatatactcatcaatggggagatcacttcttcaaggcaatggcaggctaccaaatggaattaaaagaagattcacaggaatatatgtacaaagatggtatgctgagtaatgatatttactcatttgacaacgccagtggaaatgtaatagcaggtgaagcccgttcacattggtccactatgggattttatgcccgtttgaattggaactacaataatatttattttttggagttcagtggacgttatgatggttcttcccgttttgctgcggggcatcgttggggattcttcccatcattctctgccggttatgatattgctcgcacgccttatttccaaaaaatggcactgcctgtatctcagttgaaggtacgtgtttcttatggtcgtttaggaaaccaaaatggagcgggcttatatgattatatcgctcagatgcccttagatgcacagggtactaatgcttggttattaccgggtatctcttcttccacagcttccaaaggtacgattgcacaaactccgaaaatgattagtccttatattacttgggagaaagtggataatgctaacttaggttttgatttgatgttgtttaagaaccgtttgtcaattactgctgatttatatcaacgtacaacacgtgacatgattggtccggcagaatcaataccaagtatcagtggtatcgcttcggaagatcgtgcaaaagtgaataatgcaactttgcgtaatcgtggatgggaactttctgtcagttggaatgataaattgaaatgtggtttcagttatggagttggtttcaacgtttttaactataaggctgtagtgaccaaatacaataatccggaaggtattatttataataaccatacaggattggctgctaataaaggttattatgaaggtatggatctcggtgaaatttggggatatcgtgctgatgatctctttttgtcgaatcgtgaaattgatgattatctgagaaaagttgatctgacagcgttcaaatcaaacgatctttggcgtcgtggtgacttgaaatatatagatactaatggtgacggtagagtagatggtggtaaaggtactttgtcagaccacggagatctgcaggttattggaaatactactcctaaatattctttcggtattaatttgaatcttggatataagggtttcgaagtatctaccttgttacaaggtgtggcaaaaagagatttcccgattgctggaagtaactatatgtttggtggaaataactataactttaaagaacatcttgattatttcagtacagagaacccaaatggatatttgcctcgtttgactggttggaaagatgataaggattttttagtgaatactggatacaatacgacacgttatttgttaaatgctgcttatatgcgtatgaaaaatttaacagtggcttatacatttaataaaaaacagttgaaacatattggtatcagcaatctaaaagtgtatgtaacttgcgacaacttgtttactataacaaagttgccgaaacagtttgatcctgaaacactgaaccaggtaaatatgtcggcgggtggtgatgctaagaatacagctccgggtttaacttctccgatgaagcaaaatggtaatggtatggtatatccgatgaaccgtaacttcgtgttcggacttgattttacattttaattagataatgatgatgaaaaaattatatatattattagcggtaggggcaagtgttatgatgtcggcgtgttccgattttctagatagagaacccatgacaacccccaatagtgaaacattcttgtccaatgcaagtgcagtgaacaattatattaatggtttgtatatagcacttccttcttttggtacttatgacatgggagtccgtggagaagaaaagaatagtgacaatatcgtggccgaggtttatgataaacgtcttaatggagagctgctggagacaggaggaggtactgccgaatggcagaacggataccagaatctacgtaatgtaaattatttttttgaatattataaagttccagaagcagaggaaacaaaggatgtgctgtcactgaaaggggaagcttattttttccgtgcttattggcatttttacttactaactagatttggtagtattcctgtaatggataaattttgggatggaaacgctacagttgcaggtttgcaaattcccccacgcgatcgttcggcagtggcacagtttattattgatgatttgaagacggctaagaatttgctttattcacgtagtcagtataaaggcttgaggatttgcaaagaagctgctatcatcatggccatgagagtggcgctttatgagggtacatgggaaaagtatcataagggaacagattttgcagccgcagaggataaatctacagatcttttaggacaagtgttgacactaggtgacgaattgtttgctatgggactttctttaaatacaaaagataatgataagaaatttgtatctaaagaagatgcttatgcacacttgtttaattcgaaagatttgtcggatatgacagaggtcgttttttggaaaaagtattcgatagcagatggagtgactcataatttgagtagtaacttaggtgctggttatgtggacaacagtggagcggctggtttagctcaatcattgattgataattatctgaatgctgatggaagctttattgatcctaacgatggaatttataaggatttcaatcttacatttaaagaacgtgatgctcgtttgttagcgacagttatgcattcaggctgtaaatttaagtctacatctcctgagtctaagtcaaaagctatgtttgtggatgaatattcggatgaaaataaacagaaagttcgtcctccttatctaacagaaagtggtccggcacgtaatgcaactggttatcatattcgcatgagtattgatacaacttatgtcagtggccagggtgagacctcacttccgataattcgttatgcagaagctttgttagcttatgcggaagctgcagaagaattagataaatgtgatcctaatgtattggaaaggacattgaaacctttgcgtgaacgtgcgggagtgacctatactgctcctgctgaaattgatcctaattttaccgattttggttatccaatctctgccaaattgcaggaaattcgtagggaaagacggtcggaactagctttacaaggattccgtttggatgacttgatgcgttggagagctcacaaattgattcagggaaaacgtggaacaggggcatattttggagcagatggtgtgttatataaagcatttgatcctaaaacagctgtagatttgaaaactattttaactacggatggttggcttgatccacagaaagaggttcttccacgaggctatcagtttgattctaaccgtgattatctgctgccaattcctccgagtgaattgtcactgaatcacgaattggaacaaaatccgggatggcagaggaaataagagaatagaacaatatttattgatgataattagataaataaagatatgaagaacatattatatagaatgcttccaatatgcttgtttactataagtttgacaggttgtgaagatgaaacaaaatatcgtcctttgccggaagcggtgccgttgactatgagcattaacgaaaaggcatttgtgatgggagaaaatctgaaagtaaacatcaatgtggatgctgatgcagatgggaatgagatggtagctaacgaggactttgatatttactttacggctaaagctggtactgaagatgtatcggatgtatttgaaccatttagcggtattgttacgtttccaaaaggagaaaaacaaattcaggtggattttccagtgaagaaatccggattgacggggagtactgcgatggagtttgttgctttcgcgcgtggttataaaatggcaaattcgagtcaagcaattaaagtatccgattattatcggataaccatgtctttggaaaataatgtagataatgtagtaacggaaggagataaatttgttttagtggcaaaaatagacaaggcaaaggcaatacctattgatgtgactattactcctaaagagggcgaggaagggcgatatgaaaatttgccttcgtcaataactattcctgcgggaagaactagtgtgaagagtgcagctatcacaattaaagcggatggagaaaaaacgggtgatttgaatttaattttaaattttgaaagctcttcttctgtaaatccaatgatttccccgacattaagtattgtgatgactgatcttgaatcgttagctgatcctgatttgtatgatatgacaaaagtctatttattgccggagagtccatttgcatcttctcaaaatagagatctagttcattcatggtttactggaagagttactgatatagaagaaaattctgtccattctaatgaggtattggctgctgaagggtggagatttcattatgctgtcgaatttcataaaatagagccagctaattattgggatgctacttctaatatgctaaaatgttttgctagttccaacgaagcagctgttcagaaagtagcaacagtgaacaataaagaatgctctaatttaaataataatggagagttggtaatgtgggctgatgctgtgcatgggggcagtaaagcgtatggatttagtgctatgcaatgttgtaaggttaatggtggacagggatcccctttcttaggtaactttaccagaatttacccgggtatgagaattgaattcaaagttcgcctgcgaggtgtacgaacaggctttgttcctactatagaaattaaaaatccggatgtaatgtctaatggagcaattaaggcgataaaaattcttcagaataaagcaggttcttttattacacaatctgtgacaggcgataaagttgccgatgctgtatcaaaggttactgccatacctcaagcgaatgaatataatatttattgggtggaattggttgatgatgaacatattcaacttggtattaacggggttgctacaatgactgtgagtaagaatgatttaggaagttggccttttgagaaggctgccatgccttctaataagcttggatgtagagggctttttcttgtaatgcgaatgagcccatcagatgatcttgaggctggaaatatggaaccgggatgggactcagacctgaaatctgtgtctgatcctgaaacagagggaccgagaatggagattgattggattcgtttctatgttaatgatgcttataaggttgaaagcaatgagacgaataatagaaatacaatattctattaataaattgaaacgttcaatggtttgaggtaaagtctgtgctaaagagggattgtaaaaaatggacgtactttggtatagattgagtgaaaagaattgaactgaaaatattgaaggaatttaattaatgatttgtggaagtgaagataggaatccctccctatctttgctttctcaatctaacacaaatttattatggaaaatctgcaatcaaacttattctattctttagcgggagtagctacccttgcttcttttgcttcatgcaccggtaaacaaaagcctgctgaacagcctcccctgaacattgtctatatcatgacagacgaccatacggctcagatgatgagttgttatgatactcgctatatggaaacgccgaatcttgaccgtattgctgccgatggcgtccgttttactcaaagttttgtagccaattcgttaagtggtcccagccgtgcctgtatgataacgggtaaacatagctgtgccaataaattctatgataatacgacttgtgttttcgatagttcccaacaaacctttccaaaacttttgcagaaagccggttatcagactgcattggtaggaaaatggcatttggagagtttgccgtcaggatttgattattgggaaatcgttccgggacaaggagattattataatccggatttcatcacacaaaaaaatgatacgattcagaaacatggatatatcaccaatcttataacggacaatgccattgattggatggaacacaagcgaaacccggagaaacctttctgcttgttgattcatcacaaggctattcatcgtaattggatggcggatacttgtaatctggctttgtacgaagataaaactttcccattgccggataatttctttgacgactatgaaggacgtcctgcagcggctgctcaggaaatgagtgtcgtgaaagatatggatatgatctacgaccttaaaatgttgcggtcggataaaaattcacgcctgaaatctctttatgagaaatttttgggacggatggacgagggacaacgtgccgcatgggataaattctatgctccgattatagaagatttctataagcaaaatctgcaaggaaaggaacttgccaactggaaattccagcgttatatgcgtgattatatgaaaactgtgaaatctcttgatgataatgtaggtcgtgtgctcgactatctgaaagaaaaaggactgttggataatactcttgttgtctatacctccgaccagggattctatatgggcgaacatggctggttcgataagcgctttatgtatgaagagtccatgcgtactcctttgataatgcgtctaccgaaaggattcgatcgtagaggagatattactgaaatggtacagaacatagattatgcaccgactttcctcgaattggcaggagtggagataccatcggatattcaaggagtttcgttggttcctttattgaaaggaaaacagccggaaaactggagaaaagccctttattatcatttctatgaatatccggcagaacacatggtaaaacgccattatggagtgcgtacagaacgttataaactgattcatttttacaatgacattaattggtgggaactgtatgacatgaagacggatccgagcgaaatgcacaacctttacggacaacctgaatatgaatccgtagtgaacgaactgaaagaagaattgcaaaagttgcaagaacaatacaatgatcctgttcgcttttcaccggacagagacaaagaataaataaaatacatcagcatgattaaatatatctttatcttattgataggttttttactaccagttacgacgggatgtactgatactaacttgacacatgacatacccttggttccacgtccggcacatttggtgccgggcagtggcaactatctcttctcagacaaaactgtatttgtggtggagaatgaggaacaggcggctgtggcagccagtcttatttcccgatttaccaatgcagccggttttactcccaagttggttgtgggcgctacggaaaagggggatgttcggtttgtaacggatgcttctttaaagagcgaagcatattcattggaagtttctccagaggaaattatcgttaaggcttccggtgataagggattcttttatgctttgcaaactatccggcaattacttcccgcatctatcgaaagagaaagtctgtcggataaaaaagagaagtggagcattcctgccatgaatgttcaggatgaaccccgttttgagtaccgtgccttgttactggatgcatcacgtttttttattcctaaagagaacgttttgcgtatcattgactgtatgtcgatgttgaagataaataaactgcatttccatctgacagatgacaacggctggcgcatagaaataaagaagtatcctcgtttgactgaggttggcgcatggagagtggatcgtatggacgttccgtttccggcccggcgtaatccgaaatccggagaaccgactccgataggaggtttctattcgcaaaaagatataaaggaaatggtagcttatgcggccgaacgccagatcgagattgtgccggagatagatatgcctgcccatagtaacgctgcattgacggcttatccgaaattggcttgtccggtagtgaaggactatatcggtgtattgcccggtttgggaggacgaaactcagaaatcatcttttgtgccggaaatgacagtgttttcacttttttgcagaatgtgatggatgagattatggagttattcccttcccgttatatccatatcggaggcgatgaagctcaaaagacacattggaaaaaatgtccgttgtgtcagactcgtatgaagaaagaaggcttggctaatgaagaagaccttcaaggctattttatgcagcggataagtgactatgtacgtagtaaaggtcgtgaagtgattggttgggatgaactgactaacagtagtttcttgccggaaggctctattattcttggttggcagggatatggcaaggctgcactgaaagctgcggaaaagggacaccgtttcattatgactccggcacgtatcatgtatctgattcgttatcaagggccgcaatggttcgaacctttgacatatttcggcaataatacattgaaagatgtatatgactatgaaccggtacaaaaagactggaaaccggaatatgcttcattgctgatgggggtacaaggttctatgtggacggaattctgcaataaaccggaagatgtggattatcttttgttccctcgtctggcagcggtggcggaagtagcgtggacacaaccggaaaagaaagattgggcttcgttcctgcaagctatggaccggtataacgggcatattgcagaaaaaggtattgtctatgcccgttcgatgtacaatattcagcataaagtaacaccggaaaatggtgggttgaagttaaatctggaatgtattcgtcccgatgtagagattcgctatactattgatggcagtgaacctgtggcaaattcttctgtgtattcagactcactgattgtaacagggactcaactcattaaatgtgctacctttgcagaaggtgtgcagatgggaaagacgcttgtattgccgattacgtggaacaaagcgactgctaagacgatacttggaaataaacagaatgagatgcttatgctcaatggtgttcgtggaagcctgaaacagactgactttgaatggtgctgttgggacaagaacgaccttatttcttttaccatagatttgcagcagaaggaaaaaatgaatacttttacaatcggttgtatcacgaactatggtatgggcgtacataaaccgaaatcaatacgtatagctgtatcagacgataataaatcttatcgtgacgtaaccggattgaactacactcctgaagaaatattccgtgaaggcacctatattgaagacctttctatggatatgaaaggaacggaggcaaggtatattcgtgtaacggtgaatggagcgggggaatgtcctgccgaccatgttcgtccgggacaggaatcgagagtatattttgatgagatcattattgaatagtacaacatagtcataacaataaccatgaagaacctgaagaaacgaacttttttactcttattggcaggactgactgctactgtttttgcttcggcacagaaacagccgttgcccgaatggcaaagccagtatgctgtaggactgaataaactcgctcctcacacttatgtatggccttatgccaatgcttccgatattgagaagccgggaggctatgagcaatctccttattatatgtctttgaacgggaaatggaagttccattgggtgaagaacccggacaaccgtccgaaagacttttatcaaccttcttattatacaggaggttgggctgacatcaatgtgcccggaaattgggaacggcagggatacggaacagctatctacgtcaatgagacgtatgagttcgatgataagatgttcaatttcaagaagaatccgccgttagtgcctcatgccgaaaatgaagtcggttcgtatcgccgtactttcaaagtgcctgccgattggaaaggacgtagggtagtactttgctgcgagggggtaatctctttttattatgtatgggtgaacggtaaattgctcggatataatcaaggttcgaaaactgcggctgaatgggatattacagaggtattgaccgaaggagagaacgtagtagctttggaagtctaccgttggagttcgggtgcttatctggaatgtcaggatatgtggcgtttaagcggtatcgagcgggatgtgtatctttacagtacaccaaaacaatatatcgccgactacaaactgaatgcctctttggataaggaaacgtacaaagacggacttttcggacttgaagtgacggtagaaggtccgtcttctacggcaagctcgattgcttatacactgaaggataccttcggcaaagccgttctgaaggatgctatcaatatcaaatcccgtggattgagtaattttatagcatttgaagagaagaagattcctaatgtaaaaccgtggagtgccgaatatcctaatttgtacacattggtgcttgagctgaaagacgcacaagggaaagtaaccgaactgaccggttgtgaagtcggtttccgtacttcggaaatcaagaacgggcgtttttgtatcaacggtgtgccggtattggtaaaggggactaaccgtcacgaacattcccaattaggacgtaccgtaagtaaggaactgatggaactggatattaagctgatgaaagagcataatatcaacctggtacgcaattctcattatcctactcatccttattggtatcagctttgcgaccgttacggattgtatatgattgatgaggctaacatcgaatcacatggaatgggctacggtcctgtttctcttgctaaagacagcacttggctgactgcgcacatggaccgtacacatcgtatgtacgagcgttcgaagaatcatcccgctattgttatctggtcattgggcaatgaggctggaaacggtatcaactttgaacgtacatacgactggctgaaatcagtggacaagactcgtcctgttcaatatgaacgtgccgaactgaattacaatacggatatttattgccgtatgtaccgtagtgtagatgagataaaagcgtatgtagcgaaaaaggatatttaccgtcccttcatcctttgcgaatatttgcacgcgatgggtaacagttgtggtggattgaaagactattgggatgtttttgaaaacgaaccaatggcacaaggcggtaatgtttgggactgggtggatcagtctttccgtgaaatagacaagaacggcaaatggtattggacgtatggcggtgattacggaccggaaggaataccgagcttcggcaacttctgctgtaacggtttggtgaatgccgaccgtcagccacatcctcatctgctcgaagtgaagaaagtgtatcagaatataaaagcaactctgctgagtccgaagaacatgaaacttcgtatcaagaactggtacgacttctctaacctgaacgaatatgaacttcattggaatgtgacggctgataatggagagaaaattgcagaaggtacgaaagtcttagactgtgaaccacacgctaccatagacgtgtcgttaggaaatgtgattttgccgaagacagtccgtgaggcttatctgaatattagttggacacgcagggaagcttctccgatgatagccgaagattgggaagtggcatacgatcagtttgttattgtcggcaataagaattatacgggctatcgtccgcaaaaagcgggtgagacggctttcacggtggataaagaaacgggagcgcttacttctcttgctttggatggtaaggaactgttggctactccgatcactcttagtcttttccgtccggctacggataatgataaccgtgacaagaacggagctcgcttgtggcgtaaagcgggattggataatctgactcaaaaggtgacctcattgaaagaagggaagaatacgacaactgcgactatcgagcttcttaatgcaaaaggtcagaaagtgggaactgccgactttatctatatgcttgataagaacggtgcattaaagatacgtactactttccaaccggatacagcgattgtcaagtctatggcacgtctgggactgactttccgtgtggcggatacttacgatcaagtttcttatctgggacgtggtgacaatgaaacgtatgctgaccgtggccagtcaggtaaaattggcttatatcagacaacacccgaacggatgttccactattatgtcactccgcaatctaccggtaaccgtacagatgtgcgttggacgaaattcaccgatcgttccggtgaaggaatctttgtcgattcaaatcgtcctttccagtttagcatagttcctttctcggatgtattattggagaaagcccgtcatattaatgagttggaacgtgacggactggtgactgtgcatttggatgcagagcaggctggcgtaggaacagctacttgtggtcccggagtattgcctcagtatttggttccgttaaaaaaacagagttttgaattcactctttatccggtgaagtcggcaggacaagcgcagaaaaaagagaattattatgtgaaacatcttgagtttcctcaaaatgcaactttggagcaaaaggtagatatggctgcgcgattaatccctactccccagcagttgtcttggcaacaaatggagttgactgcttttctccattttggtatcaatacctttaccggacgtgaatggggagatggaaaagaagatccggcgctgtttaatccatccgaactgaatgcggaacaatgggttcgtactcttaaagaagccggtttcaagatggtgctgttgacggcaaaacatcatgatggattttgtctttggcctacggctaccaccaaacattccgtagcttcttctccttggaaaaaaggacgaggcgatgtagtaagggaattgcgtaaggcttgcgataaatatgatatgaagtttggcgtttatctttctccttgggatcgtaacgcggaatgttatggagattctccccgatataacgacttctttatccgccaattgacagagttgcttaccaattatggggaggtacacgaagtttggtttgacggagcgaatggggagggaccgaacggaaggaagcaggtatatgactgggaagctttctataaaacgattcaacgtctgcaaccgaaggctgtgatggcaataatgggcgatgatgtgcgttgggttggtaatgaaaaaggtttgggacgtgaaactgaatggagtgcgacggtgcttactccgggcatttacacccgttcggaggagaataacaaacgtttgggcgtattcagcaaagcgaaagatttgggaagccgttcgatgttggcggaggctacggaacttttctggtatccgtcggaagtggatgtttctattcgtccgggatggttctatcatgcggaagaagatacgaaagtgaagtcgttgaaacatttgtcggatatctatttccaatcggtaggatataactcagtacttttattgaatattcctcctgaccgcagaggtctgattcacgaggccgatgtgaagcgactgaaagattttgctgcttaccggaaaagagtgtttgcagacaatcgtgtagtgaaaggtcggaaagagtggaatgcggtttcgggaagtgagaagatttattctttgaaatcggaatcggaaatcaatgtggtaatgcttcaggaagatatcgctaaaggacaacgggttgaatcctttgccatagaggtgttgaccgaacagggatggcaggaagtcggacagggtactaccgtaggctacaaacgtttgctgcgttttccggcagtaaaggccagtcaactgaaagtgaaaatcaatgaatgccggttgtcggctcatatcagtcaggtcggcgcgttctatgcaacaccgttgcaggaagataatcagacggaaagttggaatgacttacctcgtaaagaatggaaacaggtggctgcttctccgttgacgattgacttgggaaagatggtgcagctgtcagcctttacatacgctcccttgaaggcggaagcaaaaccgacaatggcttttcagtataagttctatgtaagtacggatgggaagagttgggcggaggtgccgaccaatggtgagtttagcaatatcatgcacaatcctctgccgcaaacggttactttcaacaaaggcgtacaggcgcgtttcatcaaactggaggctacaacgcctgctgccaccattgctaaagtagaaatgaatgagatcggagtcacagtagctccttaatacagataacctattatttcagaacataagatgaaaaaagaatattattatggtatattgcctttggctttaacctcttgtctggtttctcagacatctgctcaggaaagacagataaaccgtccgaatgtagtctttatttatgccgatgacataggctatggtgatttgagttgcaatggagcgaagacgattcacactcctaatgtagagcgtttggcaaagatgggagtacgttttacaaatgcgcatagtgctgccgctacaagtacgccttcccgttatgctatgctgaccggtgaatacgcttggcgtaaggaaggaacgggaattgcagacggagatgccgcgtctatcattcgtccggaacgttatacaatggcggatatgttcaaagaggcaggatatagtacgggggtggtaggtaaatggcatttgggacttggcgacaagggaggtgaacaggattggaacaagcctttgaaaccgggcacaaatgatatcgggtttgattattcatttatcatggccgctaccggtgaccgtgtgccgtgtgtttttgtggaaaacgaccgggtgattaatcttgatccgaatgatccgattcaggtaagttataaaaagaattttccgggtgaacctaccgggaaagacaatccggaactgctgaaaatgcatccttcccatggtcacaatcaaagtattgttaacggtatctcgcgtatcggatacatgaaaggtggaaaatccgctctttggcaagatgataagattgcggaaactttaaccgggaaagcgatatcttttattgaaggacacaaggatgctcccttctttttgtatttcgccactcaggatgcacatgttcctcgtgtgccgtctcctcagtttgtaggcaaaagcggtatgggacctcgtggcgattgtcttcttgagtttgactggtcggtaggacaagtgctggatgtattggaacgcttgggactggataaaaatacattagtggttttgtctagtgataacgggccggtagtggatgacggttataaggatcaggcggtagaattactgggcgatcataaacccggaggtgtttatcgtggaggaaaatacagtgcttacgaagccggtacacgtgtgccgtgtatttggagctggcagggagtgattcgtcccggtaccgtttcggatgcgttgctttgtcagatagactggtttgctacttttgcgcaaatgatgaatttccgtttgccggaaggggctgctccagatagtgaaccgttactgaatgcatggacaggtaaagaaaagaaaggtcgggaatggctggtacttcagaatgcacagaataatctgtcggtgacggatggacggtggaaatacctgcgtcccggaaaaggtcctgcatataacaaaaatgtcaatattgaattgggcaacagcatgaaacctcaactttatgatataaagaaagatccggctgaaaagaataacgtagcagagaagaatccgaaaatagtgacgaaaatgtcggaacaattggaaaagatagtagacggccgttatggcttgcctttgtaaaagaatgcttagagagtagcagtgtagaccggtgtcttgattctttatgagtcggatgccggtctttttttttattttctaaaccaaatgtatatccagactgttatttcttaaaaaagacagaagttatgctcgtggtagatttaggaaagtggatgaataaaatcctgatagattgggggatagacccggaagttgccgaccgttttgatgaaactattattgctatattgatgatagcgattgctgtcggcttgaattatctctgccaggcgattctcataggaggaatgaaacagtatacccggctaaagccgcataaatggaatacactgctgatgaagcgtaaagtgttccatcatctgattcatactgttccggcttttcttgtctatgctcttttgccaatggcatttgttcgtggaaaagagttattgctgatttcacagaaagcgtgtaccatttatataatcttttcactattgttggctatcaatggtatcctgctgatgattatggatatttacgatggtaaagaatctatgaagaaccggcctatgaaaggatttattcaagtcttgcaggtcgttcttttctttgtgggcggaattgtcatcatcgctattattgtaaataaatctcccgccagtctgtttgcaggattgggagcgtcggcagctatcctgatgttggtattcaaggattctattttgggctttgtggcgggcattcagctttctgccaatgatatggtacgtccgggcgactgggttacgctgccttcgggggaagccaatggtacggtgcaggaaattacgttgaatacggttaagattcagaattttgataatacaatttctacggttccgccttatacattagtgagcacgccatttcagaattggcggggaatgacggagtcgggaggacggagggtcatgaagaacattaccttagatctgactactttacagttctgtacaccggaaatgctggaccgttaccggaaggagattcccttgatggcagactatcagccggaagaagggacggttccgaccaattcccaagtatatagggtatatattgaacgctatttgtgcagcttgcctgtagtgaaccaagatttggatttgattatcagccagaaagaggctacgatgtacggagtgcctattcaggtttacttcttttcccgaaataaaatctggaaagagtacgaacgtatccaatcggatatctttgaccatttgctggcaatggttcccaagtttgacttaaaggtttatcagtattcggactgaatggaatacgtcacgttaatgccgtggtcatgccacgttagtgtcacgactgtgccactccgttagcactgttatgccaatgcgatgtcactattgtgccaacgtggtggcactaaactacttcctgtggttgtgtgagctttgtcaggggagtactagttcgaagtctgtatagatgggaaggtggtcgctgaaccctccttgatatttcattcctttataggtgcgaaaaggttctttacctccatactttttgtcgtcggtcaacaaaaaaggaagttggcagactttcgctttttcctcacgagtgaagaaattaccggaagtgttgagcaatgtaccggatacaattaaatggtcaagcaatccccattccccatgatatttatatgaaccgaagttggcagtctttgcttttcgggcaagcagatgatagagctttaacggggatagggatgagggtgaggtagcaggatggattgctatatccaaactatcggaacggataggaggagcttccgcttcgagtattttccgaattgatttattgttgggataatcattgaagtcgcccatgatgatgacttgaggatggaggcgggtatgcaggacgctatccacttctgtgcgtaaaatttgagcggcatggagtcgataaggctcggattcttttgctccgcctgagcggcttggaagatggcagacgaatacatccaatgtatctccggtcagcagcagaccgttgacgtgcagcaaatctcttgtcgggcgatgttgcctgaacacaggaatggaaatagagcgggaggataagagtttgaataaatcccgttggtaaataagagccacgtcgatacctctcagatcaggagagtcagtcattacataacgataatcgagctcttgcaaaggcgaacggcgggtgaggtcacggagtactgtgtcgttttctacttcgcagagacctatgagtgctggaggattccattcaccgatagcagtgatgacacgtgcgatatcactcagtttctttttatatttgttgtaattccaatggcgcatggcattgggaagaaactcgtaatcgttcttcagactgtcatggcgggtatcgaacaggttttctgtattccagcaggcaacacggaactggatattttcttgtgccggtacgctccatgaacagataacaaacaagagtatggtaacagctactcttgtttcactgttaccatactttagttgtcgcagacttatccgtcttttattttttagcagggacatgtaccagaatatccaacaaatgtttccagaacttctctacggtagggataagcatccgttcgtccggagagtgtactcccgttaatgtcggtccgaaggaaatcatgtccagtgtgggatatttatcgaggaacaggccacattcgagtcctgcgtgaattgctttcactttggcttctacaccgaacaggcgtttgtaagattcggctgctacttcgagaatgggtgaatgcggattgggcttccatcccggataaccttcaccgaaagtgacttccgctccagccagtctgaacacggcacgtacggtatttgccatatcgttgcgtgcggacaatatagaactacgttggctggtttcaatacggatgatatggtcgggtttcatcttcaccgaagcaaggttcgtggatgtttctaccagtcccggaatgtcctgactcattgcatatactccgtgaggagccgcatacagtgctttcaacaggcggtcggtggtatcttggtcgatagctgtctggcggggagtctctgattcgagaaccaatttcaaatccggttctacaactgacagctcatcttccatttcactggcgaagatgttcagttcggtgcgtacgtcatgttttgcatcttcgggaactgcacagatggcataagcttcacgagggatggcattgcgcagatttccaccgttgatttcgcaaaggtacaaatcgtggttgttggctatgcgggtaaggaaatggttcaagattttgttggcattgcctcgtcccagatggatatctcctccagagtggcctcctttcagtccttttacttctactttgaagaagaaatatccggcaggtacttcgatttctttatacgtaaattctgctacggagtcaataccaccggcacatccgataaagatttccccttcatcctcagagtcgagattcaaaaggatatctccgctcataaaaccttctttcagggcaaatgctccggtcagtccggtttcttcatctacggtgaacagacattccagcggtccgtgttctatgctgtcatcggcaaggatagccagctccgtagccacaccgataccattgtcagctccgagtgtagttcctttggctttcagccattcaccgtctatttctgtttcgattggatcggtgaggaagtcgtgttgaacatcattgtttttctcacataccatgtcaatgtgcgattgcagtactacagtttgcaggttttcctttccgggagtggcaggctttttaatcagtacgttgcccgcttcgtccactttggtctcaagattatgtttagctccgaacgcctttaggtaggcaatcattttctcttccttcttcgaagggcgcggtacttggcagatttcttcaaaatacttgaatacgccggccggctttaggtcttttttttccatgttgtttctttattataataaggaatagaagggcggttttagcttcttctattgctaaatatggttaatttgattgacttatctgaactcatatctcattaaagcctatctttgcattcacaaaattaatagaaatggttgagactatactgataactttgttaatagttgctatttccctggttttattgggggtgaaagtattctttacgaagggtgggaagttcccgaatggtcatgtgagtgggaataaggcgttgcgtaaaaagggaatcgggtgtgctcagtctcaggatcgtgaggcacagaagaagccgcgcttttctattgatgagttagaaaaggccttgaatgatagtatgaattaaatttattaaaaacaatacttattaattatgaatagaatgaactacctcgtgaacggtttggctgctcttgcgtttatcgttttattttcacaatgcgctggcaaaactgataatcaaactgctacaactcccgttcaggcaaatgctgaattgtcaggaatgaaaattgcttatgtcgaaatagactcgctgttggccaaatacaatttttgtattgacttgaatgaggctatggtgaagaaaagcgagaatgttcgtatgacattgaatcagaaagctaactccttgaataaggaaaagcaggacttccagaagaaagtggaaaacaatgctttcctatcacaagatagagcacagcaggaatataaccgtctggtaaagttggaacaagacttgcaagagctgagcaataagcttcagaatggcttgatggaagagaacaataagaatagcttgcagttccgtgattctatcaacgcattcctgaaagaatataataagactcacggatatagcttgattttcagcaacaccggtttcgataatctgctttatgctgatagcgcgtttaatattacagaagaaatcgtaaacggattgaatgcccgatattcaccggtaaagaaatagatcatttttttattgcatattttaattttttgcctgtccggtactgtaaagaccggatgggttttttgtgcgtgaaaacaaggaaacggaatggtcagggagcttccgttatatattgtttcatgccttctgtgtaataagtctcgaactttcctttttctccactatatataaagtaagcatcaatcttgggatgcgctttacagaaagcctccgcttcttcaagccccatcaccataaatgaggtagccaaagcgtcggctgtcatacaatcttccgctatcacagtagcggacagaatgttatgctgcacaggatagcccgttctcggatcaatggtatgggcatatttctttccgtctttgtaatagaagttgcggtagtttccggaagtagccataccgagatcggttactttgagtaccgtctgtatatcttgttttacagagagagaatcatcgataggcttgttgattccgatacgccaacggtcgtttttaggattgaatccttttaccaccacttcgccacctatatctatcatatagttcttgattccttttctatccaatagacgggcgactacatccactgagtatcccttagctacagcactacaactcaacataatacgcggatcttgtttgataatcttttcgttctcaagttttactttgtcatatccggtgatttgcaacaaactatctatcattacggaatccgggaaagtgcctttcttgaatccgaatccccacgcattggcgagcggggctatcgttatgtcaaaagctccttgggtctcgcgggagatctccatagaacggttgaagcatttttggaaaaaagtatctgtcactatttcttcgttacgattgacacgactgatgacggaactgtcattgaagggtgacagtgacaagtcgaatcgttttaactccgcttcgatttccggttttaagtcaccgtcatattgataagtgatattgtaaatggttccgaacaccagaccggtaatactgttgtagtttgcttgttgattgtgtctggccaatatccagatagttgccagaattaggaaagccagccaaaggaaactcttttttgtcttcatacgttcttctatttaataagaaaactcttttttattggaaaaatagatgctcaattaatattttaattccgataattaccagaatgatacctccccataactcagcttttaactttcgggcaaggccgcagccacattgaatgccgaaaataagcccgattaatgacaggacgaatgaaacaaatcctatgatgaggataggagaaaggatatcactgtaatcctgaatacctaaaaaggcgaatgaaataccgactgccaatgcatcgatacttgttgctaccgccatggtcagtactaccttcaggcttgccgggttgaacagttggcaacattcttcttctttaaaggattcccaaatcattcggcctcccagaaaggcaagaattccgaaagcgatccaatgatcttctataagatgactgaaggtttttacacacatccatccgataagtggcatgatggcttgaaaaagtccgaaagcaaaggccatgattagcattggtctccatcgggtacttttcaaaataatgccgcttgcaatggatacggcgaaacaatccatcgccagacctattgcaagcaaccaaatctctagtcctgtcattgtattctaaagaggcaatttatagatgagggaataggtgattcccatattatttgatttatatttaccgtaacccggcacataccacggagcgccatactctccgatagaagcttttgtcttgtatttcatgcgtaccgaccaccccatattaaagttcttgtaaatacgtactttaacgcctaagacgatttccaaccattgcactgagcctttcatgcccaaatggctgaaaggaacactccctccccaataatcgtcttctaagctgggattgccaattacatctccccaaataggatcatttgctggcagggttgatacatcatatttgaaagaactgaatgcataacgaagtccggcatataaataactgtttttctcttttttctttgccatcgtgttgtagtctacgccgatacggaaaaaaggggcagctttgcttttgtagtgtatacccgtttcgctccaggtgtctgttcctcccatgccaaattcaaaagtagggatgaatttgtttttaaggttgacaccaatgctgacttctgaactcatgaagtctcctcctaagattttgcttcctatgccgtataaatccacaccgatatacgtcccgttataaaacggaatcgtatctatctcgacagtctcttttttcttcaggtctcttttgggtgtatgagtaggacgctgctgttgtgccagtaacggaagaccgatacaaaagagtagaagcagactaatcaggcgtaaccggtgtgcggtcgcgatagttaaagaatatctgtaaattctcaatttcatttgaattggcttctttatttcgtaattcgatagacgttattttctccgtactgttttttctgttgccgaatgcagcactgatgatgttttgtttcatcatgtaaccgcattccatagactgaaaatagggagtgctctcttgtacgatatatactgtatctacatcctctggattgagtaccggattatattggaagataaatacggtggaatcgctggtatagcgcaacggcaacatcactgtatgtacatctttctcattgttgagaataatggagtctgttcccattgctctgactgtcagcgagtcgagtgtgtcattgagtacggcgttatcattatccggatcgttggttttgaacgtgcaatacatcatgggacgtcctgccatagaacaatcattttcgtccgaacatgaactgtggataccgatagcggcaccaacgattatcaataggaaaaagatacgaactaaattcttcatagtcaagtattgaatgtgaatcaaattttcttttctatctggtagttattccgttccggtgcgttacgcgagattaattcgccaagaaatccggcaaggaataattgtgtacctataatcattgccgtaagtgacaaataaaaatagggagagtcggtcactagtctatatggtagattgttgtacattgcgtatagcttactactacctacaatgataacggaaatcattccgatgagaaacatcagcgatcctaacaagccgaaaaaatgcatcggcttgattccgaatttggaaaggaaccagagtgagagtaaatccagataaccgttcacgaagcggttaagtccgaatttggttgtaccgtatttgcgggcttgatgatgcaccactttttcaccgattttcttgaatccggcgttctttgccagataaggtatataacggtgcatctcaccgtacacttcgatatgttttacgacctctctgcgatacgctttcagtccgcagttgaagtcgtgcaggtttttaatacctgaaactttgcgtgccgttgcattaaacagtttggtgggaagtgtctttgacagaggatcatatcttttttgtttccagccggaaaccaagtcgtaaccgtcttcggttatcatccggtagagttcaggtatttcgtccggactgtcctgtaaatctgcgtccatcgttataaccacgtctccctgcgcttctgcgaatccacagtaaagtgcgggtgatttgccgtagttgcgacggaacttgatacctcttacatgctccgattgggattttagcttttctatcacttcccatgaacggtccgtacttccgtcattaacgaaaatcacctcaaatgagaatccgttggcttgcattacccgttctatccaagcgtagagttcgggtagtgactcttcttcattgaataatgggactacaactgatatatccatttctttaattactagttacgaattacaaattacaatcaactcggctcattgtttccgggtttcgcttttttcattaccattaatccggtagggatggcaaggatacttccgaaaaatacgtccgatgacagcatttgcatggtaatgtcgatagcgctgagcgagtttattttatctgcatcaaacatatctttcataagttctttgttttcttgtaaagcgggactttgctctatcgcttggttccaaaaatcagcaagggcgttgaagataaagccgtgatctataaactggaagtatatgtaatgtgctacggctaccaatagggaagcgaacatatacataaatatagtgaaaagaacagcgtgtgagaattgtatagctcctccgcatactttgtcgcgatagatttttacgtaataataacctatgattggcacggctagcgttagaataacatatagcaattggaaaaaaggtatagcaaacatcaatggaagtagtatgaatttcaatatccaataagctcccatatatgtgccaaaatgcatggcgtatttctgtaaatagcttctgttctctgtcatcttcatttataaattgcgcacaaaggtacaaataatatcggttgatagagggaatatggttgttaaagttaataaagcaataaaagttgctagtagagattttttttgtacctttaattgcttgaaatgtagtctgttagttgttttacttgaaaaaagttgttcgtatctattgcagaatccgtaaaaatgcctacctttgcaaccgcaaaacgggtaagtcctatacggccagctcccttcgaatcctccagggcttgatcgcagcaaaggtagttggttgtagcggcgcgatatagatagcttacccacccccgcctctttagctcagttggccagagcacgtgatttgtaatctcggggtcgttggttcgaatccgacaagaggctcgaaaaaggatatataacaaacccaagaaaaaaagcattcaggtaattgcctgaatgctttttttcttatattttggcttgtttccgtacggttttgattcttttcaccacggaggacacagaggtttcaaggttctagttcatagataattataacctctgtgtcctccgtgtcctctgtggtgaaatagttcatttacgcaccaatatgaaaaatgacaactgcatagggacttgcagttagggtattctactatgtaatagaatgtattatgcttgtttttatacagtatttgtattattgattaaaatggtattgtttagattatcaatgatttagtttattctttgtctattataaaagcttatataaaaatccccgggatatctatcgtccggggattttatttagatgtaaagtcgaaatttatttgattctcttgtatccatacacagccaaatcacccaattcctcttcaatacggagtaactgattgtatttagccatacggtcggagcggcttaaagaacctgtcttgatctgcccgctgttggtagctactgcgatatcggcgatagtagcatcttctgtttcacccgaacggtgagaagtaacagtagtgtatccatgacggtgagccatttcgatagcgttcagtgtttctgtcagcgaaccgatttggtttactttaatcaggatagagttggcacagcctttttcgatacccattgcaaggaaatctacgttggttacgaacaggtcgtcacctaccagctggcaacggttgccgatgcgttcggtcagctttttccagccttcccagtcgttttcgttcataccgtcttcgatagagtcgatagggaatttgttgattagttcttccagatagtcaacttgttctgcggaagtgcgtttcttacctttttcaccttcaaacttggtataatcgtaaataccatcgtggtagaattcggaagaagcacagtccataccgatcataacgtctttgcccggttcgtatccagcagctttgatagcggccagaatagagttcaaagcatcttccgtaccctcgaggttaggtgcgaaaccaccttcatcacctacagcagtgctaaggccacggtctttcaaaactttctttaaagcgtggaatacttcagcacccatgcgcagaccttctctgaaagaaggagcacctacgggacggatcataaattcctggaatgcgatcggagcatcgctatgtgaaccaccgttgatgatgttcatcatcggtacaggcattacatacgtatttgttccaccgatatagcggtatagaggaaggtccagatagttggcagcagctttggctacggcaagagatacgccgagaatagcgttagcacctaaattcgatttagtcttagtgccgtccaatgccagcattgcgtagtcgatacctctctgattgagtgaagacataccaatcagcttcggagcgatgattttatttacattatcaaccgctttttgtactccttttccaccatagcgctgtttgtcaccatcgcgaagttccaatgcttcgtgttcacctgtggaagcacctgacggcacagatgcacgtcccataatgccggattccaatactacgtcaacttctactgtggggttacctcttgaatcgagaatttctcgagctacaattttttcaattttcatcgtttctattgtttttgaataagatttctgcaaaagtacggacttgacggggagtgagaaatcactataaataggtattctttttgtgcctattccctatatgtcgttagtccgaccttatactataacaacgggacgatgctttttgtttgagtgcggcagggtgaatttgcaggattttaatcttcgataataacccctaacagtggaagcaaatccattgcttgcagggaagtgatgacagcccctttcagatcgctgatgttaagcgtgattccgctgatacgggaagtgcgcaaatctattccgcgaagcggagcgtgtgaaaaatcggcttctacgagatcgcaactctcaaatgcgacggatgaaaaacggcagtcgttcagacttccgttgcggagctggctgtgtgcaaaacgtacctggttcattttactcatagccagattgatataacctgcgttgcagtcatgcagcaagacgtgattcatcgttgtttccgataaattggtacccaatagtttgcaggaaatgaattctacccggtagagtgaactttcagcgaaagaaatgttggataagtcgcagttctcgaacctgacatcggtcagttgggaggaacggaatttacattcgctgaatgtctgatgctgaaaggtgcagtttttgaaacttttataagatttgtcgatgccttcttcttttcctttgcagaataaaagatgagagacggtttcttctctgtcgagccattcctgtagggtaatagtactgacttcctgttcttccatcatgggaggaacaacgcggacgggtttggttgggtttcttttaatcatgccgtaaaggtaggatttatattcgaattattaaatctgttttcccacatatccgccggctaacgttgcggctaatcctattcctatacttaataatgtatatagaacaaatgctccgtaaaattctcctttcagcagacctacgccgtcactggagaaagtagagaacgttgtgaaacctccgcataaacccgttgtcagaaacaaacggacctcgaacggaaggtgaaatcgctctgaaagggcatagaacaggccgatgagaaaactgccgagaagattgaccgtgaaagtggcccatggaaaatgataagggacgattcgttcgtgcattaacaactggatgaaataacgcagtgcactaccggttcctccaccgataaagatatagataacttctttactcatttgattgaaagattgatattatttgtaggcggcttcaaaatctttttcgaattgctggaagcctccgggataaacaagattgatttgttctgaaatggttgacggatcattttaaaaatgtaggaaggtttacttctcccagcatatacatcgtccgaactctcccttgttcgtattcggtaaatgtgtggcggactgcttttttgtgaatggtgcaatgttcgaagtactccgacagtccttcgttaagccagcttggaggacgcttgccgagaatctgcgaaacgaaatgatgacttagttcgtgatagataatggcaagacttctctcccgtccattctcccgtcctaagatgactgccttttgtagcttaggtgagtatgcaccacttgccttgataggcagagacacattgatactttctaagtaatcgattgcttctcttctattttcaaatacatatagttggaggctcagcgtatcgggcagtccgaattgtgaatagaaatcaacctcatgttgaagaaactgttctatcttcttccggtctttttcgggaagcgggtcaccgccatattccacttttacggtttgggcatgaagcaaaccgcagaaaaagaagaccgggaagaaaagtaaaaatatgcgcatgatacatctattatttcaggttgtgtagcttcatatatttctttttatcacgtttactcatgtcctgcatgataaggtcatggtcggtcacagcctgatagatggttttctcttccggtttcacatctccttcagttgtgcggaatacaggaataaagtgggagtaagggtatccggatgataatcctcctttgaacttattttcatccagaaaaaagaaggagatggcagcacctgtggggcctgcctttcctatggcttgtccaacttgtacttcttcgcccggttcgataaaattctcgttcatcaccagataggctgcaaaagtctgatcgggatgatagatgagcagctgttgcgggttggtggttttacaggctattccgctgcgggtggcatagattgtatcaccttgtttgatgtgaaaattcaaggtcttgaatggttcacgcggatcggttttccaggctgtcttttgattgttctttacgggtaaggcataaggagtctgaatattgaaatctttaggaaatttgccccggtagaacgtataagaagaggaacttttaaacggattgtctacctgagcatctttttcccattttgactcgatgataccgtatggacgttccagcagtttacgtaaagactgcgcggaagtgtagctggcggacaatgtgaaaatcaatagagcgatcaatttaaggtgctgtgccatattctaaatagtaaagtgtttattgatatagttgggataatacgttgcaaatatagaaagattatgtaatatgcgtctttaatccttttaatttcttcaccatagacactatattttttctagcttatggatttgttatctgctttatatttaaatgtttatcccgtttctacttctatatccttctatattttctttataaagaaaaacacctctattgtttcttgtctatctttgtcctacgattattaattaactcatttatatcatgaagaacatgaaaataggaactgcaatatgggcttgcctgttgctctcttttttcttcggcacatcagcaaaggccgaaagtatcacttctcctgacggacaattaaagctaaatttctctgtcaacacgcaaggagaaccggtgtatgaactctcttataaaggaaaagaggtgattaaaccttcgaaactgggactggaattgaaaaatgatcccggactgatgaatggattcactctggccgatattaaaacttctgcttttgatgaaacatgggaaccggtgtggggagaggtgaaattaatccgcaaccattataatgagatggctgttactttgaatcagaaggcacaagatcgcaatatcattatccgtttccgtctttatgatgatggcttgggattccggtatgaattcccattgcagaagaatttgaattattttgtgattaaggaagaacattcccagtttgctatggcgggagatcatacggccttttggattcccggtgattatgatacgcaggaatacgattataccgagtccagactttctgaaattcgtggattattgcaaggggcgattactggaaacgcttctcaaacctctttctcgccaacaggtgtgcaaacttctttgcagatgaaaacggatgatggcttgtatattaacctgcatgaagctgctttggttgattattcctgtatgcatttgaaccttgatgatcggaacctggtttttgaatcgtggttgacaccggactcacaaggagataaaggatatatgcaagcaccttgtcgttctccttggcgcacggtaatcgtgagtgatgatgcacgtgatattctgtcgtctaagctgacattgaatctgaacgatccttgtgcttatgaagatgtttcttggattaaaccggtgaaatacattggtgtgtggtgggaaatgattagcggaaaaagttcttgggcatatacggacgatgtttactctgtgaaattgggcgaaacagattattcaaaaacaaaaccgaatggacgccatgcagcgaataacgataatgtgaaacggtacattgactttgcttctgaacatggatttgatcaagtattggtagaaggatggaacgaaggttgggaagattggttcggcaaatcaaaagattatgtatttgatttcattacaccttatcctgatttcgatttgaaaatgctgaatgcatatgcgaagtcaaaaggagtaaagctgatgatgcatcacgagacatccgcttctgttcgtaactatgaacgtcatttggatgcggcatatcaatttatggtagataacggctacaatgcagtgaagagtggatatgtcggcaatatcattcctcgtggcgaacatcattacggacaatggatgaacgaccattatctatatgcagtgaagaaagcggctgattataagatttgtgtgaatgctcatgaggcagtccgtcctaccggattatgtcgtacttatccgaatctgatcggcaatgagtcggcacgtggtacggagtatgaagcatttgccggtaataaaccgtttcataccactttacttccttttacccgtctgattggcggaccgatggattatactccgggtatttttgataccaaactttctttcttgtcgggcgatcatagttttgtacgtactacattggctaaacaattggctctttatgtaacgatgtacagccctttgcagatggcggctgatttccctgaaaactacgaacgtcatatggatgcatttcaatttatcaaggatgtagccgttgattgggatgacagtaagtatctggaggcagaaccgggagattacatcaccgttgcacgtaaggcgaagggtactgatagctggttcgtaggtggtatcactgatgagaatcctcgtacttctgcttttacacttgattttctcgaaccgggaaaacaatatgtagcgacattgtatgctgacggaaaggaagcggactttgaaaagaatcccacctcttatcaaataaagaaaggtatagtaactgctaaaacccggatttctgtcaaactggcccgtagcggaggatttgcgttgagcttgattgaagcagctccgtcggataagaagataatcaagaaatggaaataagatctaggcaaagagattgttctcggattccccgcttttaataaatattagttgttgccccgcaaggaaaacaaaactttgcggggctctttgttttatcagacggattcttttttgtacttttgcacatctttttaaaaaacatcaataaagagaataacatgggaggttttttcggaacagtctcgaaagctagttgcgtgactgatttattctacggcacagattataactcacatctgggtacaaagcgaggaggacttgcgacatacagtaaggaaaaaggttttatacgctccattcataatttggaaagtacctattttcgaacaaagttcgaaggagaattggacaagtttaaaggaaacgccggtatcggcattattagtgacacagacgctcaacctattattattaactctcacctcggccgcttcgccattattaccgttgcaaaggttgtcaatattcagcaactggaagatgaacttctcaatcaaaatatgcacttcgccgaacttagttcgagcaataccaatcagacagaacttatcgcattacttctgatacaaggtagaaactttgtggaaggtattgaaaatgtgttcaagcacatcaaaggttcttgctcaatgcttatcttgacggaggacggaagtatcatcgctgctcgtgaccagtgggggcgtactcctatcgtaataggaaaaaaagaaggagcatacgctgcgacaagcgaatcatccagttttccgaatttggattatgagatagagaaatacttaggtcccggtgaaatcgtccgtatgtatgacgatcatatcgaacaacttcgtgaaccgaatgaggatatgcagatttgttcgttcttgtgggtgtactatggttttcctacttcttgttatgaaggacggaatgtagaagaggtgcgcttcacttgtggattgaagatgggacagacagatcaatcggaagtggactgtgcttgtggtattcctgattcgggagtgggtatggctttggggtatgcagaaggcaagggggttccttatcaccgtgcgatttcaaaatatacaccgacttggcctcgtagttttactcctagtaatcaggagatgcgtgcgttagtggcgaagatgaaattgattccgaaccgtgcaatgcttgaaggtaaacgcttgttgttttgtgatgattctatcgttcgtggcacgcagttgcgtgataatgtgaagatactatatgattatggagcaaaagaggtacatatgcgtattgcttgtcctccattgatttatgcttgtccgtttgtaggtttttccgcttccaaaaatgcgttggaactgattacccgccgtattattaaggaattggaaggtgacgaaaataagaatttggataaatatgccactaccgggtctcccgaatatgagaagatggttggtattatagccgaacgtttcgggctttcttctttgaagttcaatacagtggaaacattaatagaagctatcggtctgcccaaatgcaaggtttgtacacattgctttgacggtagtagccatttttaaagtggtcagataggtcagttaagtatccggataaaactatacaataaaaaagagccgtgaattgctttgtaattcacggctctttttttacctttacggcactataaactatcaatttgtaaattgtaattagtaacttgtaattaaaacgatatgactttagtagacagatttttaaagtatgtaagcttcgatacacaatctgatgaatcgacagggcttactccaagtacttcgaaacagatggtttttgcagaatacttgaaaaaagagttggaatctttggggttagaagatataactttggatgagcatggttatctttttgccacgctccctgccaatatagataaagaggtgccgactatcgggtttattgctcacatggatacaagtccggatatgacgggtaaggatgttactccgcgtattgtagaaaagtatgacggttcggatattgtactttgtgccgaagaaaatgtggttctttccccgtcgcaatttccggaattgttggatcataaaggagaagatttgattgtaaccaacggaaaaactttgctcggtgctgatgataaagccggtattgcagagattgtttccgcaatggcctatctgaaagaacaccctgaaatcaaacacggaaaaatccgtatcggtttcaatccggatgaagaaatcggtgaaggcgctcataaattcgatgtagaaaggttcggctgtgagtggggatatacaatggatggcggtgaagtgggggagttggagttcgagaacttcaatgctgctgccgctaaagttacttttaaagggcgtaatgtacatccgggatatgctaaggataagatgattaattccatttatttggtcaatcggtttattactctgctgccgacacaggaaaggccggagcatactacgggatatgaaggattttatcatttgattggcattcagggtgaagtggagcaaagctcagtttcttatatcattcgcgatcatgaccgtactaagttcgaaaaccgcaagaaagaaatggaacgtctggtcgctcaaatgaatgccgaatatggtgcgggtacggtaactctcgaattgcgcgaccaatattataatatgcgtgagaagatagagccggtgatgcatattatcgacaccgcttttgctgcaatggaagctgttggtgtgaaaccgaatgtgaagccgattcgtggaggtacggatggtgcacaactttcttttaaaggcttgccttgtccgaatatctttgccggtgggctgaattttcacggacgttatgaatttgtgcctatccagaatatggagaaagcgatgaaagtaattgtgaagattgccgagctcgtagcttccaaataactgatacttaaaacttaatacttaaaagataatgaaaaccactccgtttatagagaaacatatagcgcttggcgctaaaatgcacgagtttgcaggttataatatgcctattgaatactccggtatcattgacgaacatctgacggtctgtcagggtgtcggggtatttgacgtatcccacatgggagaattctgggtgaaaggtccgaaggcattggcttttcttcagaaggtgacttccaataatgtggcggtactgactccgggaaagattcaatatacttgtttcccgaatgataaaggaggaattgtagatgacttgctggtatatcagtatgaaccggaaaaatatatgttggtagtcaatgccgctaatattgaaaaggactgggactggtgcgtttctcataatatggaaggagcggaattggagaacgcttcggatcacatggcgcaacttgctgtgcagggaccgaaagcgattcttgctttgcagaaattgactgatattgatctggcatcaattccttattatacttttaaagtcggaaagtttgcaggtgaagagaatgtgataatttccaataccggctatacgggtgcaggaggttttgaactatatttctatccgaatgtggctgatactatttggaaagcggtctttgaagccggtgaggagttcgatatcaaacctatcggtttaggagctcgcgatacacttcggttggagatgggattctgtctgtatggaaatgatttggatgatactacttcaccgatagaagctggacttggatggataactaagtttatagaaggtaaagagtttatcaatcggccgatgctggagaagcagaaagcagaaggagtaacccgtaaattagttggctttgaaatggttgatcgtggaattccccgtcatgggtatgaacttgtaaattcggatggggagaagattgggatcgttacttcgggcactatgtcgcctacccgcaaaatcggtatcggcatggggtatgtgaaaccggaatacagcaaggcaggtacggaaatttgtatcgatatgcgtggtcgtaaattgaaagcggtcgtggtaaaacctccgttcaggaaataattgaatatttatagaaacgcagattaacgcaaatttgcccagaataagatttgaaattaaacttctgcgtgaatttgcgttaatctgcgtttcttatatggataaacgttgctcattccatagatttattataattttgtcagcaaatatgatgaaataatgtctcagttacctactcttatagccgatctcgcactgatactgatctgtgcaggcatcatgactttattatttaagaagttgaagcaacctttggttttagggtatgtggttgccggctttttggcaagtccgcatatgccttatacaccttccgtaatggatactgcgaatattaagacatgggcggatataggtgttatctttttgttgttcgctctcggactggaatttagttttaagaagatagtaaaagtgggtggctctgctattattgccgcttgtactattattttctgcatgattctgttgggtataggcgttggtatgggcttcggctggcataggatggatagcctgtttttgggtggtatgattgcaatgtcctctactacgattatttataaggcttttgatgatctggggttacggaaaaaacagtttaccggcttggtcttgagtatcttgattttggaagatattttggcaattgtgttgatggtcatgctttccacaatggctgtaagccataattttgaaggtacggaaatgttggaaagtatcggtaaactattgtttttcctaattctctggtttgtggtcggtatctatctagtaccggaattcttgaaacgttgccgtaaactgatgggagaggagactttgcttattgtgtcgctggcactatgtttcggtatggtggttatggcggctaatacgggtttctccgctgctttcggtgcgtttattatgggatctattttggcggaaacaattgaagcggaatctatcgaccgattagtgaaacctgttaaagatcttttcggagccatctttttcgtatcggtaggaatgatggtggatccggcgatgattgtagaatatgccgtacctattcttgtcattactttggcggttattttggggcagtccgtattcggaacatttggagtaatactttccggcaaaccattgaaaacggctatgcaatgcggctttagtctgacgcagattggtgaatttgcatttattatcgcatctttgggagtctcgctgcacgtgacaagtgattttctctatccgattgtggtggctgtttccgtcatcactacttttctgactccttatatgattcgtcttgccgaaccggcttctactttcgtagatgctcatcttcccgtttcatggaggaaatttctgatgcgctactcttccggatcgcagactgcgctcaatcatgagaatttatggaagaagttgatattggcaatggtacgcattactgtcgtttattctattgtcagcatatcgatcattgcgctttctttccgttttgtcatacctttctttaaagagaacctgcctcatttgggagcttctttacttggagctgtgtttatcattctctgtattgctccatttttgcgggctattatggtgaagaaaaaccattcggtggagtttatgactttgtggcacgccaatcgtgcaaatcgcgctccgctggtatcgaccattgtgattcgcattatgatagcggcactttttgttatctttgtgatttccggattattcaaggcgtctatcggcctagttatcggagttgcagtgctggtagtgttgctaatggtatggtcgcgccgcttgaaaaagcagtctatctcgattgaacgtcgttttttccagaatcttcgttcccgtgatgtgcgcgcggaatatctaggggagaaaaaaccggaatatgccggacgcttgttatcgcatgatctccatcttgccgatatggagattcctggtgagtctgcttgggcgggaaagacattgatggagctgaatttaggaaagaagttcggagttcatgttgcttccattcttcgcggaaagagacggattaatattccgggtggttctgtccgtctgtttccaatggataaaatacaggtgatagggacggatgaacaattgaatgtgtttaatgaagccatgcaaaatgggacaaaggtggattgggatgtgtatgaaaagagtgagatgactctaaaacaattaattgttgatagtgattccatgtttttaggtaagaccattcgtgaatcgggtattcgggataaatatcattgtatgatagcaggtgttgaaagtgaggatggaacattgatgattccggatgtgaatgtgccgcttgaagagggtgatgtggtctgggtggtaggtgaaaaagaggatgtataccaattagtcaatcaaaaaaacgaaaaagtacaagtcggataggagtgttatgcctatttttgtaaacgataaaaacttaaaaataataatatcatgaagagcgatccgaaagaatgtctgtattgtcagaataatgaaacgttgcataatctgatgattgagattgcgcagttgagtgtgtcacgtgtattcctgtttaaggagcaaacctatcgcgggcgttgccttgttgcttacaaggatcatgtgaacgatttgaacgagttgagtgatgaagaccgtaatgcttttatgtcagacgttgcacgtgttacccgtgccatgcaaaaagctttccagccggaaaagataaattatggtgcatactcagataagttgtctcatttgcattttcatttagcgcctaaatatgtggatggaccggattatggaggcacatttcaaatgaatccgggaaaggtttatctgactgacgcggaatatcaggaactgattgatgtagttaaggcaaatctgtaaatgataatctagagtctacggttcacggttcaccacagaggacacaggggacacagaggttgtatatcgaagcatacctataattgtattaagagtataatcatggacagtgcctaaaagactcttttccctatttcctctgtgtcctccgtgtcctctgtggtgaactattcttcaaagtcaaaatcgaagtcgaaatcgtccataaactccggagttgtaaattcttctagctcgcggcggtcttttttagttgggcgtccggttccgcgtgcacggtctatgaatccgctgattttgctcatttctaacaattcgtattgatcgggagtagtgacgttttccatcatctccggtactaactttgcacctatgcgcttttcgatagcctgcagtaccttgaaggaataggtgataggtggcttttttacctgtatgacatctcccggttttaccatacgggcagctttcaccaatgcgccattgatggtgacgcgtccttttttacaagcttccgctgcaattgtgcgtgtcttgaagatgcggacagcccacatccatttatctattcttgcttccgccattttatttcttattaaactggttcattgtgatatcaattccggcaaggcaaaaactcttgatgatttctccagctgtttccaatctttcattcattgttttccagtcttcatcagtgaagtgtccgagtacgtaatctatttgtccgccacgaggaaaatcatttccgataccaaaacgcaagcgggcatagttctgagtccctaatgttgcagcgatatgtttcaaaccgttatgtccggcatcgcttccttttcccttcaaacgtagtgttccgaaagggagtgccagatcgtctactacaatcaatacattctctagtggaatattttctttttgcatccaatagcgaacggctaatccgcttaggttcataaaagtagacggtttcaacagtatcaattggcgacctttgatcgtgaaattagtggtgaatccgtagcggccgtcaataaaaggaggagcactgttggttttagccaatgaatctaccgtcataaatccgatgttgtggcgggtctcatgatattcgggaccaatattccccagtccgacaattaaatattttatcattgttttttcggtaaaacagttcgttaatgtagaaagagaaacgcagattaatacaaattaatgcagactgaacatctgctttaatctgcattaatctgcgtttgaagtatatctctgtttacagggatatactcagattatttgcctgcagcggctgctgcacctcttgctgcacgagtcaacttaacggcacatacaacggcttctttagcactgatcagttcaagaccttcaaagctcaattcaccaactttgatagtcttacccaatcctaagtgagaaacgttgatgatcagcttttcaggaattacattgtacaaagctttcactttgatcttacgcatctgcaatgccaacttaccaccggctttcacaccttctgcaagaccttccaactgtacaggaacttccattacgataggtttagcttcatcaatctgatagaagtcaacgtgcaggatagtatcctttaccgggtggaactggatgtctttcaagatagcgtttacttttttgccatcgatcaccaagtctactacgtagatgtgcggagtataaaccaagttgcgaagaccttcgttagtcactgtgaagtgaactacttcattacctccgtaaagtacacaaggtacaccaccgttcttacgcatttctttcaaagctcttgcttgttctgaagagcgttctgcaattgttcttgcagttccttttacttcaattgatttcatttctttaaaaatttgtgttactctaaattaagttagtttgcttaattcaccatcacacgatgtggattatcacacgatgttgcaaaaaagcggtgcaaaagtacatctttcttttgaaatatcaaagagttactcctttaaaagtcaatatcaatcttaatttcactctctaatttctcttcttgggcttcttcggtagcttttcgctcattctcttcatcggcttcttggtccagctggccgctgtagtcacccatttcactacggtcgataaagctgatagcttccgtcaaccctgccataaacttctgaaagtcttcccggtataagaagattttgtgtttctcgaagctcacttgagagtcatcaccttctcccgttaccacttttttactctctgtaatagccaggaacatttcatctttacgattcttttttacgtcaaggtaatagatgcgtttacctgctttaatggacttggagaatacgatctccttgtcattcatgtctgcgctcattttcttttttaaatcttccatatcttacggtccgtttataatcggcttcaaaattggatattttttttaaactgtcaaaagaaaaagcgcagagaatgaaatactgcattaaaaaatgtgatttatttgtggaaactcattaaaaatatctacttttgcagttcgataacaacagtattaatttgaattatgatcaacagagttcttattcgtcttaagattatacagatagtatatgcctattatcagaatggcagtaaaaatctagactcagcggagaaagagttattctttagtctttcaaaggcgtatgacctttataattatttgctaatgctgatgatagcattgacagagtacgcacaaaaacgtattgatacggcaaaagccaaattggcacctacggcagaggagttatatcccaatacgaagtttgtgaacaacaagtttgttgctcaattggaggtcaataagcagcttacagagttcatagctaatcagaaaaggacttgggcgaacgatcaggatttcgtaaaggaactttatgagaaaattgtgggaactgatatttataaggattatatggcttccgatgatgattcttatgaagcagaccgggaattatggagaaaactctataaaacatatatttttaataatgattctttagatcaggtgttggaggatcaaagtctgtattggaatgacgataaggaaatcgtagatacattcgtgctgaagacaattaaacgttttgatgaaaagaaaggcgctaatcaggaattacttccggaattcaaggatgatgaagatcaggaatttgcgcgccgtctgttccgccgtactattttgaattctgactactatcgtcatttgattagcgagaatacgaagaattgggatttggaccgtattgcatttatggatatcattattatgcaaactgccttagcggaaattttaagtttcccgaacattccggtcagtgtttcgttaaatgaatatgtagaaatagcgaagttgtatagcacgtctaaaagcggtagctttatcaacggaacgctggatggaatagttaatcaattgaaaaaagaaggtaagttgaccaaaaactgatatctttgtatacattatagaaactaaaactgattatttatgaacgtattgactttattattagatgctcctgttggggctgccggaggtggaagtatgatgtggatcatgctgatagcgatgtttgttatcatgtatttctttatgatccgtcctcaaaataagaaacaaaaagaaatagctaatttccgtaaatctcttcaagtaaatcagagcgtgattactgccggtggtatacacggaacaatcaaggaaattaatgatgactatgttgtacttgagattgcttctaacgtaaagattaaaatagataagaattctatctttgccgacgcttcagcagctagcaatcaatctaaataaatagctggtaaatacatgcctatgtttgatcgtagggaaataagatatacatatttaaaactatctaggagaattaaggattttctgctcagtgataagagcagagagttcttaatttttttatttttctttttgatagccagcggattctggttacttcaaacattgaataatgattatgaagcggatttctctatcccggtgcgtatcaaagacgttcctaataatgtagtgttgacctctgaacctccttccgaacttcacgtcagggtgaaagataaagggactgtccttctgaactatatgttgggcaaaagttttttcccggtgaatcttagttttcctgattataagggaaaagataatcatgtgaagatttacgcctcggattttgaaaagaagataataagccagttgaacgtgtcttccaaaattctttctataaagccggatacattagattatatctattcggaaggaaagtccaaactagtacctgttcgtcttcaaggaaaagtgactgccggacttcaatattatgtgtcggatacgatttgtaatcctgattcagtattgatatatgctccggaaggaattttggatacgataacgactgcttatacgcaaaagataaatctggagaatatttcggatactacgcggcaacgggtttctttatctccggtgaaaggagtaaagtttgttccgagttcggttgaaatgacattcccggtcgatatttatacggagaaaaccgtagaagtgccgttgcatggaatcaactttccggcggataaagtgctgcgtgccttcccttctaaagttcagattacttttcaggtaggcttaaaacggtttcgtagcataaaagcgagtgacttcgtaattaatgtctcgtatgaagagttgctgaagttgggttcggataaatacacggttaagttgaaatcatttccaagtggaatcaatcaaatccgtattactccggcacaagttgattttttgatagaacaaatatcttccaatggcgattaaagtaggtataaccggtggtatcggtagcgggaaaagtgtggtttccagattgctcggcataatgggaatccctgtttatatttctgatatagaggcgaaacgtattacgaatacggatgaggtaattcatcgggaactgtgcgctttggttggtgaggaagtttttcagaatggggaattaaaccgtccttttttggctacctatatgtttgggtatccggaacgcacgaaagaagtgaatgggattattcatccacaggtgaaaaatgatttccgtcaatggaccggtcggttgagtagtaaaccattagtcggcatggaatcagccattcttatagagtctggttttagagatgaggtcgatgttttggtaatggtatatgcaccattggatataagggtagaacgtgccatgcgacgtgatggctcttcaaaggacttggtaatgcagcgtatcgaggctcaaatgagtgatgaggttaagagaagtcaagccgactttgtgattgtgaatgacgatgaaacacccttaattccgcaggttttagagcttatttctttgctatctaaaaataatcattacctttgctccgcaaaaaaataattaataaacaaaagaatatatactatgttgaagactatcttgtctatctccggcaaaccgggattgtacaaactcatttcgcaaggaaaaaatatgttgattgtagaatcagtcaatgctgagaaaaaacgttttcctgcttatggcaatgaaaaaattatttctttggcagatatagcaatgtacacggacgatgcggaagttcctttgtatgaagtgttggaagcaatcaaggaaaaagaaaaatctgcagccgcttctattgatccaaagaaagcaactcctgaacaattgcgtgaatatttggctgaagtattgccgaattttgatcgcgaacgtgtgtatgtggctgatatcaagaaattagtttcctggtataatatcttggttgttaacggaatcacggaatttaaaccggaagaggctaaagaggaaacagttacggaataaggaattgagccgattgtttaatcgaagtggaagcatgataatcacataaagatggttatcatgcttttttagttggaatgtggatatttcaaaaatatattagtattaattgggtaatctttgattaaaataaatatcttctgtttatattgtaaataatacttctttttatgtatctttgccttcatagttttaaattgatgttaggggagatggagacaataacaaataaagaagtaaatgtccgtttggacaatcaaaaaggaatcttgtgcataaccggcttattagttggtacgatggtatttttatacgattcacagggagagctgagggggaagtccaagtttgagttgccctcaatttctatgctggttcctaaatatgggacttatgtattggtgatgagccatccgaactgtcaaccggaagttcgtaggataatatattcagagaaataaaaaatgagagtgtgtcataccgcgatgaacgcaaattatcgcagattatttatgacacatcctcattttaatttaatgaaacctttagttcctgaatactaatccgtcaccgctagcgtctacaataattgctttgcttcggtctacttcctgagaaagtagttttttggacaagtcgttcagtaggtagcgttgaatagccctctttaccggacgtgctccgaattcgggatcatatcctactttagataagaagtccaaagcagcttcggtcatctcaagttccactccgttttcggctaacatcttctgtacgctcttgatctgtaagagtacaatctgcttgatttccttttctgttaacggcaagaacatgattgtttcgtcgatacgattcaagaattccggacgaatggtctttttcagcatattcatcacttcctttttcgtttcttcgactacctcttctttgtttgcaccattcagcttctccatctggctctgtatataggaactacccatatttgaagtcatgatgatgatagtgttcttgaagttgaccacccttcctttgttgtctgtcagccgtccgtcatccaatacttgcaacagaatgttgaatacatccggatgagctttctctatttcatcgaacagaatgacagaataaggttttcgtcggatagcttccgtcagttgaccgccttcatcgtatcctacatatcccggaggcgctccgaccaaacgggaaacactatgcttttcctgatactcgctcatatcgatacgggtcatcatcgtttcgtcatcaaacagaaattcagccaatgcctttgcaagctctgttttacccacaccggtcgttccgagaaagataaatgagccgatcgggcgtttcgggtcttgcaatccggcgcggctacgacgtacagcgtccgcaacagcttctatcgcttcatcctgcccgataacccgttcgtgaagctcttcttcaagatgcaacagtttgtctttctcgctctgcatcattttgctgaccggaatacccgtccaacgagaaactacgtctgcaatgtcttcagcgtctacttcctctttaatcatggcggtatcaccttgcatttcgcggagcttttgctgagtctcttctatttctttgtccaaagcttggagtttaccgtaacgtatttccgcaacttttccgtagtcgccttcccgttccgccttttcagcctcaaacttcagattctcaatctccaccttattctgttggatcttgtccatcaacgtcttttcactctgccattttgccttgaaagacttttcctgctctttcagttcggcaagctccttaccgatgatttccaacttaggcttgtcattctcacgtttgatggcttcacgctcaatctccaattgtttgattttacgggaaatctcatccagcttttccggaacggaatccacctccatgcgtaatttagcggcagcttcgtccatcaggtcgatagctttgtccggcaagaaacgatcggtgatgtagcggctacttagttctacggctgcaatgatcgcatcatctttgatacggacatgatgatggttctcgtagcgttctttcagtccacgcaggatagagattgtgctcaagttatccggctcatccacctgcacgatttggaaacggcgttccaaagccttatccttctcgaaatatttctggtattcgtcgagagtcgtagcaccgatagaccgcaactcgccacgtgctaaggccggttttaggatattggcagcgtccattgcaccttccccttttccggcgcctaccagcgtgtgaatctcgtcaataaacaagatgatatcaccttcggatttcttcacctcattgactacggacttcaaccgttcctcaaactcacctttgtattttgcaccggcaaccaatgctcccatatccaatgaatacacctgtttgtttttcagattttcgggcacgtctccacgaagaatacgatgcgccaatccttctacaatggctgtcttaccggtacccggttctccaatcagaatcggattgtttttagtgcgacggctcaatatctgaagtacgcggcggatctcctcgtcacgtccgatgacagggtccaacttaccgctacgggcagcttcattcaagttgatggcatacttttcgagtgactgataggtgtcttcacttgattgggacgtaaccttttctccttttctcaattcactgatggcgttacgcagttccttttccgtcatacctgcgtccttcaggatggtagaaacggtactcttgacagtcagcaatgcgagtatgatatgttccagtgagacgaattcgtcacccatttctttggaatactgtgtcgctttctgtaaaacctcgttggattcacgactcaggtacggctcgccaccggatactttcggaagtgaatcgatttgtctgtctacaacaagagcaacctgttgtccgttcatgcccaatttctggaaaatgaagttagtgacgttttcgcctactttcatcactccctgcatgatgtggacaggttcaatagcctgttgtccccgactttgtaccaggttcacagcctcctgcaccgcttcttgagatttgatggtaaaattgttaaaattcatattgttgttctcctttcttatttcatgtttctaataacacttaaaagggcgcaaaagatttgccaagtagaaaaatatgacaaaatagcatgaatattaaggagttaaaggacaaaatgactttttttgtttagtgcagactgacgaatttgcaagataatcaagtggataaatgaaagtattgtagtatctttatccgctgtaatgatataattaaggtatatatgaatgataaaccccaaataaaactgtccgaaacagtagtgctgatagatgccgcttttctgaattttgtaataacggatataaaaaactatttcgagaagacattgcaacgttctttacaagagatagacctttcgttgtttacttcctatctgactctggatgcaggaatcaacgaaggaaagaacgaggtgcaatttctttttgtatatgataaagaatcgagacacttgcaacattgccagccttccgacttgcaggaggagctgaacggagttgctttccgaagtccgtatggcgagttctcttttgccggtgtctcgtcggagggcatggtgtcgagagaagacctgtttatggatttgctttccgttgtctctgattcggtggatgtgaagcggatgattgttgtttctttcaacgaggaatatgggaagaaagtgactgatgttctacagggactgaaaggcaaggaagttatgcagttccgtatgaatgaaccggaaataccggtaaactacaaatgggatatgttggcttttcctgtgatgcattcattgggaataagggcggaggagttataatcgctaatactaagttgctgtgtccgattttcgtttaaaagtttttcagagtgtagcgaagaacctaagttttacgaaggcttcgcaagagttgtttgtcagccagcctgctatcaccaagcatattcaggagttggagacttgttaccaaacccgtcttttcgatcgtcagggaagtaaaatctccttgactgaggccggagagctgttactgaagcatagtgaaaagattttggatgattataagcaattggaatacgagatgcacttgttgcatgacgaatatatcggagaattaaaactgggtgccagcactacgattgcgcaatatgtccttcctcctttattggccaacttcataacaaagtttccacaaatcaatctttctttgataaatgggaattcccgtggagtggaggtggcgttgcaggaacatcgtattgatctgggattggtagagggtatcttccgtttgccgaatttgaagtacactgcattcctgcaagatgaactcgtggctgtggttcatacgcggagtaaattggcggttgccgacgaaatccttccggaagaacttccaaatatccccttggtcttgcgcgaaagaggttccggtacattagatgtatttgagcgtgcgctgctgcagtataatctgaagctctcttctctgaatgttttaatgtatcttggcagtacggaaagtatcaagctttttctggagcatacggattgtatgggaattgtttccatccgttcggtacataaggaacttgttgccggcactctgaaggtagttgaaataaaaggaatgccgatgcaacgtgagtttaactttgttcagttgcaagggcaggagggaggattgtcccaagtttttatgcgttttgcgggacatcatagcaagagtttataacctcgcttaggaatctctactagaagaaaaacaatattatctctcatctctcatgatttgcttgtaaattgttgattatcagtttagcattttatgagagatcttttttatgctaccatctctcatgctttccgcaccttttgagacataatctttaactcattattcttcttgtttcttttttatatagattctgtgtgcacctcttccagcgattccgattccggaattgggttgatctccccattgttttaattctatggttgctgccgtttgtaagagtcctgttagtttccgatattcatgaaccgtaaggaacgaatgctcgtcgagatatttcaatgccagtttgagacgttgctccggtgtgaacttctgtgaggaacgttgctttttccaagaggctctttccagtcggcatctttcattaattcttctcagcatgattttgtctactcggaaatttacatttcctatataaatactctgtgcattacgatgttcacttccttcttcagctccttcccgttctttatctttgtacagggccagcgacgctgtgaatgtgccgattccgtctatcttaaccgagcgtccttccgccattatgtgtgccatttcgatggaggtttggagcaatataccttctatatctcctgggctgaaaccactgacgtcacccactcgttgggcaagttcttttatgcttacattgtctacccgtgcaaacttcggatatgtgattcttttccccgtattctgtaagtcgggcatctcctccattatgtactttgccatactgtttgttgtttaaatcattagtagataagttcttgtatactagggcaaaacttctttttctctaatagataagtacttttgggttaagtataaactataaacggagctttcgtttttacaaacgcaagtttcatttataaaaacgaaagctttggttataaaaacaaagccttcgtttatagtttcctcttgtacaaaggtaggttttatatttgagaaaaagaagtttagcattaataaaaaggaatttatttattaatagattgtatggaaagtactaggataaagtggaagtaggaaagggtggctgcggagtatgtttatatatttggcatactttaaaaagtgtactgtacagattcccacgcttgaaccgaatattgcaaaatatcaatctgattatcaaatattaacatcggaaatcgtatgataatgataccatatagttcccgatatttgtgaggattagcctattctttcttgtgcaacctcaatggcttttcgctttaattcgtcttcatcttctatagcatccaatactttgtctgccagccatagtgtaagaagttcatttttatcaatattgaaatactcagctaattgtattacttgtgtccgtttggcatatctatcgccacgctctattttgctaaacattggagtgtctatatcaagcaaagctgccaattgcctttgtagcacaccgtgttcttctctcaactcttttattttgtctcctaataacatggtctttattcttttcagttcagtatgtattttcgtcgaaattcgatggatttaaacatttttgacggaataggctgtcattatccgctataatatgacggaatccgttataaattccgctataattagcgaaaaccgctatatctgttgtggttattctttcaagaaccaagttcgcccattagcaaaaataagtttatctacacttagagcattaagaatgtctcctaatatcctcaattgctgttcccgtgttttagcttgcggcattacatctttgatgtattcgtagatgccatcacgtttggcgccatctgatcctgcattcttaagatattgcaaaaccatttgtttaattttgtccttatcaagtcctttttgcttggtgtaaccttgcaattgacgagtagctttagcaactcctaaagaaattgtataattgggagcatcgccctcaataagtcccctgttcagcaagtcttttgcaacatcttcatgtatgaatctgcctttctgtacagcgtcgagagatatgcaatcccataatgacagagtgttgtcggtcttcaataaatccgtatatcgcttattgatctcgttaccatatatgcgtactacaaccttctttttcgccgcatcaatctcgtagtccggcatcggaaagtgtctgcgccattgttcattaaacattttcttgatgccacgacttacggtatcaatcatattgaagtccaccattgccttgcataggcattcattgcggaaataggtctgagattcctcatttctcaaagcattttccaaagttccggggatgaaagtaccggcgttggaataatatagatagccgggattctcaacgaaattgacacgctgttgcatcgtgtaatcttgatgagcaatacagttatgaagtgcttcgcgtatagtgtagtcatcatactgcttcattgtatctgggaaaagcgtaccaccaggcatttcacgcaaagtcagattttcaatctttgagagaatttcatctactgtcagtatgaatggaacagtgaaatgttcgtagtcaaccacatcttgatttgcatccctgcgtgtccaggttacctgagcgacaacagggcgcagtttaaaggctgattcgtatttgcctaacaatatgatagcggcacgagtgatgcttccatttcttgttagtccgcatttgccaagaaatgtctgaatatcccaagcatttacctcggattcgggaatacggctatgtaccttcttaaacattttgcgggctttagctatagcaacttcgtcaaggtcatctatcgttgcatcaggaacaatctgtgcagaccaatctgtttcaccaaatattggctcatcaagaatgacattcatgcgttcagtggtcaactctacaagagaatcttcaattcgctgccatgctttgttatgagcgtaaacaggcaatttgggacgatgcttgggaatatgtattacccaaactttcttgttagtgtcatcggtaacaaactcttcaatatcgagaccttctgtcgaaagattaacacatcgttccgttaaacgaagaattgccttttgccagtcataattataggtatccgtcccgacaatttccaaagaactgtcatgtacccctatcactaaatgtcctccttccatattggcaatagccgacacatatgagatgacatcgtttttctcatccccacagaacgagttcttcaaattcttgaattccttccattcgcaacgagcattctcttgtggatagttgcgaaggagatattgttgtagttctgactcttgcataattacccaattatactttcactttcatcattatgtttctcagcatttcggatgacgcattctttacttgtattggcatagcagtagacacagaaatgacgacaagtattatacatgccgatgtccttgctgaccatacatccacataccttacgttgccctgtatcctttacattacgcaccttctctggtattggtggcaaattaccaaacaagtctttttctggtaatttcaatgtatgtagataatagacaagttccttatcgtcagcaaaaatgcgtttcatcaattcgccatcaatgcaacgattgtgttctatcccgtatttttcaaggtcaatattttcagcacaagtggcgatttcaacatcccaaccatctttgtgccaagcttcacgaatcttttgaagaccttctacaatttctattcgttgagcaaggttggcttcggcattctccacattctcctttgtaaagagcatactttccttaacaagattgttttgaaccttgcgatatgcttttacatcaacgaaactgaatacaagcttatttgtgtaacctttcagtttatttccaatgcgccaaatgcgcgtcaagaggtcacgaggagcaatgtttggcgtaattattaaaggatcaaaacgccagattactttctccttaccaatcatatcagaaagtttcttgaatgtctcaactctgttttcgacagacgaaacattaggctcaaaaccttcttttacataatcgttgagtgtaacctgaaagtagtagtgtattcctttttcgtcaagctcatgaaggtatgggagaatcggctttgggttttttgtccagaaaatcaccaccttgcagtttttgaacgaaatatacattttctgctggttgaacggattataccaagcacaataccctttagccaagcggttgaagaaccacttggcataaaaggcaggaatatcggttgaacgacttgcagagacaatgacaggagctgtagcttctacttgttcacctgtatcgttcgtgataataattttacctattggcataacgattaaataaatcttgcattaactgctcaaagtactgtttattctcataagttccctctacgataggaggataaccacctttatcataaaaacaccaatgcttaaaatgatcaatggttgatctattatctgtagggttatccaatggattagaacagtatttaccaccaggagcataacctttttgaaatgttattacctttctggaaagcgtttctcgcatttttataggtaggtagtttcttgaaaggataaaatagttaacatttgcatcctctacaaatttagatgatgttggatgtattggtttcaggtttcgcttttcaacaccaccctgcgaaataactttatttccttgtggttgtggatgcgaagtcgtatttaaacttttaatacttgaaattagtttctcaatcttcttatacgcagcatcagttggtttcaagaagttgtcaaggatgctcaagaacgcttctggatcttgccttttactctcaagttctatagctttatcaatattttctttttgggtctttaagccttccttacctacaatcgaataaattttactacggaattgttctggtgtataagagccctcatctcctgcaaaattaacagcatcaagagctttgtacgctttagttgtagtaatacgtgagaaactactaaaaatatacataaaagctttaggactttgaactatattttcaagttcaacagccttatttattgcctcaacaactttctgctgttttacaacttttgactctacattatttagattctcaataatcttagatcccaactgactttctacaataactgaagtattattgctcgcttttggtaagactgcatcctttatttctactccattaagcattcgccaaacattacttgcaaatgattgataataatccttattgccattaatcaatacagacgtaaatgtctttggcagagacgtaaaacctcttgtggcaccatagatgccataagctaacttataattacagaatcctacttgtacaaggtactctaccaagcgatcaatgttatcgcctttctgacagaatgcagcaaacgatgaaagtacatcattttcaatagcgaataagtcaaaggcggagttctcctgaaaatgattaagtaatgctccaacataagcagatgcaggatttgagtcccatttatctccaagcatgttccttagaatcatacctccattatatgcctgtgccaaaggttcttctacgccattttcttccattacagatttgtactctgccataaactgggagcaaataaggttcttatagaaagaactttggtaagatgtgtccaaaatatgcaaagacagattatcatcaacattcagcaattcctcaatggcatacttttcacgttgagcattatcttttgcttccaatttacgaatggcgctattcatattgtctgtgacacgagaaaacgtctctggggaaacatactctaaacaactccacaattcgtttgcatcatagactctacgaagaggaagtttgttacagaatgcgtcataaacaccccagtagtgcaaaagattcttggcatcttttgtagaaagaccttgcggattgtcagacaattttaactctaataaatttttgttccaaatggtatcttcatctattgaagaatagatttcattaaacactctgattccattcaagatagcatcgtcttgtgcctgagtgggtcttttatcaggagaatttacaacagcagaaagcgtgttacgaagttttcttgataaagctttcaatttgccaacctcgttgctgaccgagctattagcacctattagataacaataaatgaaacctttaattctgtctagcagaacgtctctactaacatctataggttcattcttgatcttgaaatttacatataaaggattccataagaaatcatctttttcagattgagtaaataaatctttggcaacgccaaaaaatgtttttttctctttgggtttaacacctatgttaggagcataaagcttatagaacttattctccagactttgttctgcctttgacaatacaccctgacgctcctgataactattaaaatagatacgacaatgaaaagggttaaggttgatggtatgatagcagagataggcctctactccgtcatgttccttagccttctcaaagaatccatctttatagtcatcagtttctatctcaataaccataggatagttctcaaggtcattttcttcaatctcgaaccttggatatttactgtacaatattattacttggtctttgtcgttcgcgcagacaggatagaagcgtttgttaccaaagccgcgtcttgcgtaaaatcctaagggcgaaattgactctgaagacaatatgttattgaaattcagagtacaggttggtatgtataatttcataattatcctcgttttttaggagttgacaaacctcatagtgttaatttgggaccgctcgtaagactcgtatcataaagcgaagtaggtacatcatcaaaaagactggaaagattgcctgagtgcattatatacaaagcacgataggttcttgttacggccacatatagtggatttcggtttgcatcgtcttcaacagtacattcaggaatgaaaacatgttcaaattgaagtcctttagaactatggtaggtcatcatctttggattgtctgaagaaaaatctagatccataaactgtccatacttagcttcaacgttaagaccatgattcttgaaatattcatatgcacgctctacttcatcattgtgtctaaataggatgccgacatcctccatgtttttgttttgaataagcgaaatgatggcatcatactgttcagtaatgttattgtacttgataatctttggcttttcaacaccctcttcagtacaacgctcttcaagttcgtcactttcggaatttagatactgtgcaagacgggctatctttttgggtaatcgatgattgaacacaagctgttcgacagggaacttagtaaaatactgtatatcctccattgaaacagtttgcttatctttaataaaagtataaagttgttgagccgaatcaccatacaacaataatgctttttttgccttagaacggaatagttctatatcctctctttggaaaaatcttgtgcttcatccacaataatataatcagcacttggacatccagctctattctgccaatgccaatgataatcaacatttcgttgtggaatacctacctgtgaaatgccatcagccatatattgcattagtgctttagtgaacacaatgtaaagataggtacccttatgctcatcttgtatttgttttgccttccacaaggcaagaatggactttccgctaccagcacaccctttaacaatgtaggagttatctgttttcttgttaatcacctttacctggtaatcatcaagttcggaatctttaacgtaaaaacttctcttagccatgattagatttatagatttatgttaaaactatcaattattattttattgtttttagatcgactgcaaattgccaaatcatcattttgcttgtatttggtggggtgtatgacgtggataaggtttgctgtttccatcccttgcatgatagctgtcttaagcggtttcttacacagcactcgataacacaccctgctttcgtcatttgatttgtgagaatgacttacgctgaatgtttgctgcataaagcaaaagtctctacatccatcatgacaagcacacgacaacggtagaagcgtctcaatggttctgcttttacaaacatagtcatttattgtattattcatcaattgaggatagaagtatcctgaatgttcgtctttagttgttacatcaagcattataagcaaaccattttcatgaagaaaagccgtaagtttctttgccattattgcgtatgcatttattggtaggacttctttagaaattaactcacaaaccatcttgtcacagaggataaaatgataatcgttctttccgaatgcaagtttttccacgtcttcaatagagcctaatgtttggctaaatgtagttagttcgacttgtatatttttattagggttacactctactaaatccttgagtatggctaaagcaccatcattgccatctattgctgtgatgcttatctttgtatgaggtaaatgtcttccaattgctgtaatcaagccaagaatttccccacccgtaccgcaaccgtaatccaatacactaatctcatcttgttccaacgttttcttcaggcatttattctgcaaaagattatcagcaatacaaaacatttctgcataactgcgaggaaagtaagtaccaagatagactttaagttcttcttcgttgagatcaagattatactcataacgctcatgctctggagcataaatagcttgatggtcattgaaaatctttttgtcaagccaatgtggcagaatcgtctttgactttcggaaacaaacgttcgaattagtatttgatagttcttttgattgatgttcttcgacaacgccagatgaattgtcactttcggttgcaattctctcgccttcttcccaaaagattgtagaaggtgaaatggctttaacagcatgattaatgaactttgcgagttttgcacaatgttcaccgatgccatctgcatttattgtcacaacatattcttgagttaaccttattccgtgtgctgcaaaagatgaagatgcccttgtgctgtcaagcaccttgactgtaaaattgtcgagcttgagcgataattttactatccttttcacaaaattcgaaagtgcaatactattttcgtcctcgacaacaaaagaatcaaagtttaacattacctcttttttcttttgttttttctcttcagtgtggggctcgtacttctttatatcttcgatcaactctattttctcaattggctctgctggtttatcataagtagcattgctgaattccgtcaggtagaaaggatttaggttgagagtttccgcaagtttaacgattccgagtggggcaaggtcggtgtgaggacaagtgatgtcatccaacttttcaatgaaatgttcgctatcagtaatgtgaagccaagacctgttggtggcacttaaattgttctccaactctattggttgatgaaaaataataaggtgtggcacgtccttgatttggttctttacaacacctaagactttaagttctttctttaccgtggaatgatttatcctagcttgttgaagaacagtctttctcgaacctcccttaataattttaccattgcatgtccattctccattttcattggcaacaacattacctccataatttttgaattctatagaaataatagcgtccttctttataaagagggcatctaactcacatccaatattatagttgcctgcgaacacacagaattcattcgaatcctcatagtgagttttgagttgctcacagagaaaccgaaactgctcacgttctgctgttgtgtcaaagtttccgactctgaatgttaaaagtcctcccattacaaaatatcaatgctatttatgtaaactaaatgatctttatttctgtactgactttttcgattaagaattgtcagtttttgactacaaaagtacataaaatatagcaaatacttgtatgtatagatatgaatttgcaataaatatatttactataaatcaactatcttcgtttaatcgaagtatgcttctttgctacgttatcattccacggaaggtcagacgatgagccaccagttcctgtcccgacatgaacctccgccggtcctccggcggcaagggtgaaaacagcgcccagcaattccgcctgttttccgtttacctgttcctgcggatcgaatacagcgttgacaaactcctcgtccgtgatttcgccgttaaaatgcttttgggccgtatcatagtctatctggaatttgatattctcaaaaagttcctctccgacccgtgtccagatatggagcgacggattccgatagtttgagacattgatacgtacaagattggcaccggatgagaggctgtaatgctgaggattggccttgcggtcaagcaaacttatctgctttcgcagcctgtctatgactgtatctttctcttttgactgctgttctgcctcttcagcttgctgaatggccttgtctatttctttttgatagccatttcgtagttttccgatttctgatttatgttgttcctgcaaccatgccttttctgcctgaagctccttgagccgtttgttgagcctggcaatctcttcgtccttgttcgagagttctttctttgctctggcaaggtctcccttgccgaaccacgagaggatggtgttcctgccctcctgcgccttctccacatctgcctgcaacttggctatgtcctcctcataacggatgacctgctgcctgtaataatccgaattggcctgatgtttggcggtggagccgacaatgccccgctgcagcccgaacggtttcatggtcttggcataactgttctgatattcgtgtagcttggtgcgccgcatcacatcatctgccgataagcgtgccccggatttcgtttcatactttttctcgccctctcgctttttacgaagtcgttcagtggttacaataggtacgatagtggcatgtaggtgcggagttttctcatccaagtgcagcacacatgatacaagattctcacttccgaaagtgtcttttagccatttcatattggcatctatccatttatccaacttgccatcatcggcaatcttcatcatctgctcatgtgttccggtcaggatgatgcggatagctttcgtctgattcttgccgactttacgatgtagtccggcatggtctattctgaattgtatggcttccgtcctgttttttactccatctggaaatttaaccaattcccgattaagatgtgtcctgttcgcatcggcattgaaaggtatatacttcttccccttggcatcctttctttctatatggcatgacataccggagtcattaccgctgccacgttgcaggtgacagactgcatattgtgtattacccatatatctttcgtttatgctgttattactctgattattggtttgtaaaatcccgtcctacgtgccgcagacaaccgggtgtcgagagggtatcccttcgcttatgggctttttgactgccactcggagagtgaaagcggtgaaaatgccctaataagctacgggattttacaaacccttttacacagacagcaagctgtccgattctcttgtcgctctactcctgcattgcatccataagttccaagtcgaatgtatctatcaaggtctgcaatgcagggttgcgttctatcatcttctgtaggatcatctgcggcgtatcttccatcagaaggaaatctgcaatgtccaatccctgactgcgctgttcatcggtcgccatcttctccaacaggtcggaacaagtggcacgcttgcagacggattgcagcatcgggactttgcgccgccattcttccgtagccttcaggtcgggaaatagaatcacttcccggcctctcaacacctgcatggctttgctgttgaagcatccgtgcataccacctgtagcaagccagatgaagtccggaatgaactgggcggcaaccaaagccgtcttctcgctctcgacaatggcgacagtccttgtcgaggatgaggcatcagccaacagatgttcaccgaacagacattgcttcatatggaagtccggtatctttttgaccgaatgtacccagcttacctgattgaacggatgcttgattcgatgcccggtcttagcatcataacccataatcttgcctgcccgcacattaccgttgatgtctatctgccagaaaacggttgccccgttccacatcttggatgtaccgaccttataaagattgaacagcctgtcagtcttctccttgcctgccactttggttagatatcggtataaagggttgacgtcaaacttctgcatggactggctaacccaatcagagggaagataagaagtctgtggtgcagaactagataatggcttcgctattggcttgacggctcttgatggggtgtcgcttctgttgttttgttcaatcatggtttctttgatggttggattatcctgaaaatacttcttcggggtataatggtagccacagctgttgatatgatcacatttgcccacatggttagggaatgtaatttgcgcattcccgtcaacatatcgggtaaaacaggactttctgccgcactttgggcaaactgttttactgcccggtctgtatttttgaagatggaatctgtactcactcataatgctttcgtttttgattactgcaaatccgaaagaccatttgcagtctgcagtccttgcagctttgcaggaaaacatcgttttcagagcccccaactgcaagactgaagaaactgcaagctgcaacgcggggtcattcattgcagttttgggttgatggttcattttcgtttatggaatatttaccggattcatacaccattttctcgtaatgcccggctttggactttttcaagagcctgctgtgacacaactccctgagatagttcatcaccgtgcgctcgctgatgttctgcagttccttaccgaccgctatggccgttttcgtatcgaaggtatcgggtaacaacgacaacaatactttgggaggctcttcacaggtattgtctgccacgaaggaacggatgcgtatgtatgaatcctcgaaatagtcattcagccggatagcggctttcaccgacaccggatccacaaactgcaggtggctttcatcggaagcataccgcaggacttggataatcagagccagccgtgccacgtgagacggatgtttcatctcccggctatcaacgtcggcatcatcctctatccgattgatacgttccactttttcgttccaccaggagaagaaatactctttggcttcactgttcatggaaagcacatgggcagcgtgttcttccattccgtctccttccgtttctgtatcataatccaaagcaagcaccttgtccagtatcttttcccaacgttttgcagccaaagaggtcttttctccgtcatcatcccggtttgtccattttgatacttccctggatttgggaagcacgaacaggatacggtcaagcagtccgttttcctcgaatccttttttgagaagttcgtgaatacgtttggtctgtgcagttccgatgatgttgatgcacgggcgttctatatgtacaggagtggaattgcttacccttattacatccaaggctccgccactccatgcggtcagcaattgctctatgagctgcccgttcgtgtagcggttggcggaattgaacatgcccatgatctcatccaccaaaatggcaacgcttcgaggattgctgttatgtgtctgtagaagcgattcgggtgtgaagtcggatacgatagtacggtgaagaacaggtttctttccgttttctcctgccgctttccatgcttccacttctgcctcatacgccttgaaaagggcatagtcatgtttacggattggacggtatgcggcttctagcggtggggtcttgcctagtccgggacggcccaccagaatgatgtacagtgcgccgttactctgccagtcgcttttgatgcggatacggtaagtaccgcccaaggctgtcgatgctgccgacagcatggacgtcgcaatgaactcaatcatgtagttctcgtatttggtcatgtcaagtataacggactgtacggcctgagggaatgcgtccaaaggaaaacctgtgtcttcggtatgctccgcctccatgcggattcggttgcacagttcaagccggctgtttttcatgtcagccatttttcctcttgcaataggatgttacactttcggacttgccccctgtctgcacgcggcgtacatcggacttggcatacatgttcttgttgcctaccttgacaggcacgaggtagccgcgcttcgcccacaggttgagcgtgccttcgcatacgtccagcagttcccggacttgcttcgtgttgagatagacttcttccgcttcacgctgcattactgccttctgctcttcctgctgtgccaggatggtacgctgtacgatggattcggcaaacatcttgaggtccgagggagtaatttccagttttacattagctccctgttcgaccagggtttctatggtaatcataaatgtcagttttgaaatttatcacgaccatctgtaaaagttccctgatgcctcactcccgatggcttgtaaaagagaagcaccgccaaccttcggggaaaggattgacggtgcaaaagtatgtatgaattaaaactaattgatatataatactttgtcttaaatcgtcatgacaatttaagactgcatgacaatataaaacagccttattttaccttattctgcaatatctgtttcttcatctgttctgataatgccactgatttcctctgtcaatgtccggaatagttcccggttttcgtcactttctataagtggtgcggactggtctttcccgtccttgattatgtgccttgccgttttcagggacccgacggcctgtcgtatggcactttcgctcttcaaagacggcaaatccggaaattgcagggtcaatccaacgctgtattctttggcggtatgcataccgtccaccagtcgcaattctttcagtacatagtacggcaatgcctgatggacggcactcctgttaatggaaacaaaactgcggagacattgtaggacctccgttttgttcttgcaattaagataatctataagaggtcgttcctgtatctttttctttccggctgtacgctgtatctttgatactgcatcaatgccggaatctgttgattccgcgccaccaacgttcctgtctgtatcggattccatttcggctgttgcggattgcaacgcccattcaccgatgcgattttctttaatggcttcgttcatggcgaagtattcgtcccagtcggcacgggtacggaaaccacttttgatggatacgctaatgatttgtcgggtaacaaaagaacagctttgtctgtccgcttcgtctgcttccggactccctgcctgtttgctgaccatgctgaccatcgcctcgaaactctttccgtagtacagccaactcaacacaagaggtgctgaaaggataatgcgcggttcttcgggcttgctgctgaaaatggattttatcctgtcccataatgtggccggagctgtatcatgcaaaggattactctcctccctctgttcatggtataactccactattcgcttgggtactgcatcctctttgaacatgaggtctatattctcaaaattccccttactgtcatcatcccaacataactcccattcagtcttgattctgggcagttgtctgaatatggccttacagatgtcaaggtactgcctctcgtccccgtttgtcatcagtcgcgcgaaacggttgtattcctctctgtgcgtgttcttccaatgaaggatatccgccttgaactggtcgtatgtcaaatttcgttcatccatattcatagtgtattttcctgttacaatccaaataaaattggatcaaagttttcggttaaatttgtttttatcttatttacagcgtattgcatttcttggtgaacttctcggccaaaggtcaaggcacgagagcctccgccggcctttgatcgagccggtgcggaggcacatcgtgcttaacacctttggctctctcgaaagccgagatttcagaacccgaaaaaatccttcgataaacagattttccttagcggtcagctctctgccgcatatcccttattagtttacaaaggccagaggagcagattattttaagcggacgttaacgccgcaacaactatgtagtattctctctgggaaaatccgtttaccggaagggtttctctatgacacgatactattgacatattcggtctgatgtttcagcacaaagaatagacggtttaccagtttgcgggcgacctttacgatagctttgctcttgggcatccgtttgcattgttccgtatagaacaggttcatcgcagggtcttgacgtaccgccacccatgccgcttctatcaggttacagcgcataacggcgtgttttcgtatggtaatatcccccgtcccatctttctctccgctggagtggcacatcgggatcattccgatataggcagccagttgttcggcattgcggaagcgggttatgtcgcatatctcggagaggaacgccattcccgtagcctgcccgaaccccggaacgctcataatcaaccgcagcggttcgcggaatcgatccgtcttggccaatgtccgtaaagcccgtgtcatctccagtttctgacggcgtaactcttccagatgccggatatgaatgtcgagggcctgacggccgctcggggtgagcgtctctatctccttcaaccaggcgaaaaagcgcttcgaccagttggaaaacggagtgagaaactcctgcggaatctcgatgcctaaataccgaagttgagacttgagccgattcttctgacgggtcgtgtctttggttatcgagttcttcaatcttatcaaggaacgcatctccaacgatacgctgtccggcgtataaatgcctttcagctcgttggctcttaaactccgcgccagcttaccgctgtccacggtgtcggtcttacgcagcttttcgctgctcttggtcggcacgtcggccggattgaccacgatgttgtcgatccctaaggccgtcagacgctcgtgtatccaaaatccgcagaagcccgcttcgtacaccgagtgatactcggcgcccggataactccgagttaaaaatccgtacaacgcttctgggctcggatgctggctaaacttcttcaatacggaggtttcggacaagaccgtaaccgaccaactcttcaaatggacgtcgattcctacataaatcttttgtcctctgaaactaattttgtttctttgctctctcatggctatcgtcgttttagttagtaaaggttttgcagctttaatctaaccaaaatctcgatagctttttcatttatccgctatcatcgcggcttaccctgattgtaaacatagggattatattattggcaagtataaaaggggatattagaaaagagggaaacggtcaatccaataggtttaccagttcttttttcatatcgtcatcaatcttgcggtatcgtacaaaagcccggctgccttccgaatgccccgacatggaggcgatcaggttcgggtctttgacctgcttatataagttgcctataaaagtctttcgtgccgtatgggtggttaccacctcgtatagaggccgtgccacatcctcgcgtgtcttcgggtcgaggactctcaccatacggtctatgcccacatatttgagaatctcctttatcttcttgttgtaaccgaaatgagagaaccggggaagtaatgcgtcttccaagtccttatatctctccagtatgtccaaagccttttggttgagcggaactctgactgtattggcgtgttccattttggtcttctgtggaatatattccacacatccgtccacgacattggctttggtcagtctgttcaggtcgctgacgcggcaaccgatcaggcactggaacatgaatatgtcccgatagaccggatgggtggcccccagaccgctcaggtcggcatagtaaaccctgtccctctcttcgagggtcagataaaacgggtcgccgtacataggttgggttatctggtactggtcaaacggattgtttcttgtcagcccgcgcttgatgcaccacttgacaaccgtccttatccggtaaaaatagcctgtaatgctgttctcggagcggatttgctcgtatttctgcttttccacatccttatagaacaatggatattgtccggcaagattatgttcctcctgtagccagctcttgaactcccgcaaatcatcggcggtaatcgtgtcaatacacaacttaaagcctctacggtgcagtacttcatgctggaaacgctcgtaacggcttatcttgtctatattgccaagatggtgcttgtagctgtcgtccgccaaagtgttttctgcgatataccggctgatctgatagacgagatggtattcttcggctttgttgccgccccttgcgttgatgtcggggtggtggtattcctctatcagtcttttcagccagttcccgtccacaccacggtggtactcctttgtgataaggtgggtgatttgctggatgtccctgtcaaagttcatccgcttctcttccgataccagagccacacgtggcttgtaaccctgtttctccgcgctccagtgattggggctgatggaaagctcgcttgccgcttttatatcgactccgccaatatcccggacacggaaatagacacgtgccagatccgtcacattgttcttggccgatgtctttctgatgaatgccgttactttcatatatatttcctccttagtttatcatttctaccagttttcgcttcatgtcatcgtctatggtgcggtatcgcctgaacgcccggcttccttccacgtgtcccgacagggaagcgatcagattcggatcggggacctgtttgtacaggttgcctacaaaggtcttgcgtgccgtatggctgctggcgatttcatacaatggtttttgtacggtattatagccgtgcgtgtcaaggatggtgaccatacggtcaatgccgcaatacttcaaaagttctcgtatgccaagattataggtatgtatgggcttgaaaggaaacagcctgtccgcgtttacatcatagcgttccagtatcttcaaggccttttcgtgcaaggggactctgactgtctttgcctgacactttttcgttttctgtggcatatattccagaaagccgtccttgatgttttcccttgtcagccggtaaaggtctccgacgcgacagccgatatagcagtggaacacgaatatatcccggatgaccgccagtttaggattgtcactcaaatccgcatcgtacaggacattcctttcctccgaagtaaggtagaacgggttcccgtatgtcggttccttgcagccgtaaagtgcatacacctcgttgtcggaatacttcatcctcttgcaccagtgcaggaatgtacagaagaagttcatgatgttgatgacggtcgtgttggaaagcggcttgggtttgtggttgataagcatacggggaacatagaactcaggatgctcctgacgcagcaggtactcattcgcgacataatcccggaaaccgttcatctgttccagtgtgacagtctccacaaagagcgtgaagtcacgattgcccagtatttcacgttggtagtcgtgatagcgggacatcttacgctcaaaacgtatgatatgctctttggttctatcagccccttcgtacttctccagatattcatgaacacggtagagcaggttcggatggttgcgttcgaaggcacgggcaggatacagcacatcttcgataacctgcttcagccatttgctgtccgccttgtccgaaaaggtcttctccactttctcgataatggcggcaatctgttcgggcaggcgtttttggtcggtggcaggtacggctgtcgtgcgtttataacttagggtatctgcatcccagtacttgtcatgaactgtaagagacgaaaccacctttatatccacattcttctcacggacacggaaacagatgttcgaggtcgtagaggaacactttttcagatagacggaaactttcatcggcaatgcgtttttggttcatatcgcaaaggtatataaattcccatatatgttcccatatatcccgaagaaacttgaaacggattaaaacaaattaagaagtcaatcccgaaactgataccacataaagcactgtaaattagttgttatatttgcttttgttatgcttttcttttcaattcttacttcttttccctattttcaaaacagatattgcagttccgcgctttttctttatatggtaatcgcttatctaaatttagaacgcaagtaaaaaatactctaataggtgtaccgattgatgatataattgagacatccaatcattttggttcgtgaatgccttcgtcataatatcgttccatttattatagatgagcgccataagcaattttattatcgtggacttagggagttcgcgactactcgtggatatttgctagatacttgtctctctgctcaagatacttatgtagcgtgggtaaagtacttttatccgggattattagactgatagatagaaataaaatctgacttttatatgggctgtttaatgaatcttttatggttgttgcttgactgcattagcgttatcaccttttggaaaagatagtgtagaagtgtaataaggtaatcttgataaagaagaggttagagctataactaaaagttataacgtataattagaaacgattagcgtgtcttgattgtttgtcatacctttgcgctccagaaaaacaattaaagatatattatatgatttcaacagctacaaaaacattgcaggcaaaaaataagactatttatgtcgccctgctttctactttgactcttttcttatttttggattatattccgggtttgcaggcatggtctgcatgggtgactcctccagtagctctgttcctcggacttatttttgcattgacttgcgggcaggcacatccgaaattcaataaaaagacttctaaatatctattgcaatactccgttgtcggattaggattcggtatgaatctgcaatcagcgttggcttccggtaaggaagggatggagtttactattatttcggtggtaggtacattggcgataggttggtttatcggacgcaagatatttaagatagatagaaatacttcttatctgatcagttcgggaacggctatttgtggtggtagtgccattgcggcagtaggaccggtattgaaggcaaaagatagtgaaatgtctgtggcattgggtactatctttattttgaatgctattgcgcttttcatatttccaatgattggtcatgctctgaacatgagcgaacatgagtttggtacttgggcggctattgctatccatgatacaagttctgtggttggagccggtgctgcttatggagaggaggctttgaaggtggctactaccatcaaattgactcgtgctctttggattattccgatagctttcgctacttcattcatttttaagagtaagggacaaaagattagtattccctggtttattttctactttgtactggcgatgatcgtaaatacttatttgctggatggaatgccggaaattggaaatgctattaatggaattgctcgtaagacattgacaattacgatgttctttattggtgcttctctttcgatagatgttctgaaagcagttggcgtaaaaccgttattgcagggaatagcgttatgggtagtcattagtttgagtacattggcatatatctattactttgcataagtaagaataaggattaggtaatatataaaagaagtgggagaatgttcgtttcgtacgatattctcccactttttttgtacaaccctcacccctccgattacagctttgaaaaactgtaaggtggaagtgattatttcttctttaactcttcaaagatcagtccatccagctcttctgctagttccggattgtcggcaatacattgtttggcagcgtcgcgtccctgtcccagcttcgtgtcgttgtaactataccatgaaccgcttttcttgatgattcccagatcggcacccaagtcaacgatttctccggaatgggagataccttcaccgaacatgatatcaaattctgctctccggaaaggaggagccactttattcttcacgacttttactttagtcagtttgcccagaatctcttcaccatctttgatcggttgtcccggacggatatccaaacgtacggatgcgtagaattttaaggcattaccaccggtagttgtttccggactgccgaacattacaccgatcttctcacgcaactgattgataaagatacaagttgtacgtgtcttgctgactgctgctgtcaacttacgtaatgcctgagacatcaaacgtgcctgaagacctactttattgtcacccatgtcaccttcaatttcagctttaggagtcaatgcggcaacggagtcgattacgataatgtcgatagcggaagaacggatcagttgttctgcaatttccaatgcctgctccccgttgtctggctgggagatgtacaggtcgtcgatgtttacacctaatttagatgcatagaaacggtcgaaagcatgttctgcatcaatgaaagctgctataccgccagccttttgtgcttcggcaatggcatgaatggccaatgtcgttttaccggaagattctggaccataaatttcgatgattctacctcttgggtaacctcccacgccaagtgccacgttcaaggctatggagcctgtcgggatcacttctacttgttcaacactgtcgtcacccattttcatgatagaacctttaccgaagctcttttctatcttttccatggctgcctgtaaggcttttagtttttcgcttgatgccattttattatctgtttcaaaattaagttcgtctttctttgccataccttattctataattaatagatttattgatttaaaatctgtgcggcgtgttctttggtcttcacctctttgggagtgataatccgttctactattccttcttcattaatcaggaaagtagtgcggaaagtacccatgtaagcgcgtccgtacagcttcttttctccccacacaccgaactcttctactaatttcttgtcagtatcggcaatcagcgtgaaaggaagattgtttttctcgatgaatttctggtgtgatttctcattgtctacactgacaccgattacttcatagccgactttgcgtagttcggagtagttgtcgcgcagattacacgcttgcgcggtacaccccgatgtattgtctttcggatagaagtacaacacaatctttttccctttataagcacttaaacggatttcttcgcctttttcattgatacccaagatttccggtgctttatctcctacgtttatcataactttctttttatcgaacaggactactcttacaattccaaatctttgtcgaattcttcatgccacggaaggccttgtttattgagttgttccatgaacggatccggattgaattcttcaacgttgtttacgcccggacgtttccattcacctttaaagaacatcatagctccgatcattgccggaactcccgttgtatagctcactccctgcatacctgtttctttgtatgcttcctggtggctgcaattattgtacacatagtatgtacgttcttttccgtctttcagaccacgtatacggcagccgatagaagtttcgccttcgtagttttcgcccaagtcctgcgggttaggcagaactgctttgaggaactgcagaggtacaatcttcaccccattataatcgacctcgtcaatgcgagccatgccaatgttttggataacacgtaaatgagttaggtattcttgtccgaaagtcatccagaaacgtgcacgtttgatagtcgggaaatgttttaccaatgattccagttcctcatgatatagaaggtatgaatcacgtggaccgatattcggataagtcaggtccttatgaatttccagaggaccggtagttacccatttcccgttttcataataacgtccgttctgtgtaatctcgcggatattgatttccggattgaagtttgttgcaaatgccttgtggtgatttccggcattacaatctacaatatccagatactgaatttcgtcgaaataatgtttagctgcataagctgtataaataccgcttactcccggatcgaatccacaaccaagaatggctgtcagccctgcttctttgaaacgttcgtgatatgcccattgccaactgtattcgaaatgagcttcatctttcggctcgtaattggcagtatccaaatagtttactcctgctttcaggcacgcttccataatagtcaggtcctgataggggagggcgacgttaatcaccatttccggtttgaaatcattgaacagagctaccagctcgtccacattgtcggcatcgacttttgctgtttttatattggggttacctattgcctcgacgattttatcgcatttctctttcgtacggctggcaatcattatatctgtaaaaatgtcggcattctgtgccactttgtgtgcaacgacagtaccaacaccacctgcaccgataataagaactctacccattttctttaattgcgaattaaaaattaagaatattagaattgtttatggagcaaatatacgtgattatttttagataatcattcgtctcgctctctttttatttacctttgtgaagtatattctcattttttttgttatctttgtcctcaatttaacttaaacgttataacaatatgaataaagtactagtttcaatttgcattgcaggtacagcacttgcaatgtcttcatgccgttcagtagagaaggcaatgcctttgtcatcaatcaatggcgagtggaatatcatagaggtcaatggctcgaaagtgactccaggcgaaagcagaacccttccttttattacttttgatactgcaaccggtcgtgtgtccggtaatagcggctgtaatcgtatgatgggtagtttcgatgtaaatgcgaaaccgggaagcctttcgttgggcgcgatggcgggtacgaagatgatgtgtccggatatgactactgagagaaatgtattgggtgctttggcacaagtaaaaggatataagaaagccggtaaagataaaatgtatctttgcaatgcatccaatcgtccggttgtggttcttgaaaagaaggaggctaatgtgaaattgtctgttttgaatggagaatggaaaataaaggaagcgaatggcgaagcaatcccttctgggatggaaaagcaacctttcatcgcttttgatgtgaaaaagaaaacaattcatggcaatgccggatgtaacttgataaacggtggttttgaaaccagcgcaagcaatgctaaatcaatctcttttccgggagtggcaagcacgatgatggcttgtccggatatggaaacggaaggtaagattctgaaagccttgaacgaggtgaagtcatttgatgtattagcaggtggcggaatcggtttgtatgacgcaaataatgcattagtgctcgtcttggaaaagtaataagtaagaataatatatataataattaaggtatgcctgtgtcgcacatgatgacataggcatatttttttgttggcattgaaccagaaccgcctgtatttgtttaatgagtcagttgctgatagtgtccgggtttgattgtgtcagcagtgttttatttgttgaaactgtctttttggcagatattatgtcaagcattcgtataatttctttttggcatacggtttgtcttttaataaacgttcgtttgggattacaccctaggaaaaggatggaaaaacaaccggacaaaagaaattatagaataaataataaataaaaaataacgatcatgggaaaaattattggtattgacttaggaacaacaaactcttgtgttgccgtatttgaaggtaacgaaccggtagtaattgcaaacagtgaaggtaagcgcacaactccttcagtagttgcttttgtggatggtggtgaacgtaaggtaggtgatcctgctaagcgtcaggctattaccaaccctacgcgtacgattttctctattaaacgtttcatgggtgaaacttgggatcaagtacagaaagaagtagagcgtattccttataaagtagtgaaaggtgacaacaatactccgcgtgtggatattgacggtcgtctgtatactccgcaggaaatttctgcaatgattcttcagaagatgaagaaaactgccgaagactatttgggacaagaagtgacagaagctgtgattaccgttcctgcttatttctctgactctcaacgtcaggctacaaaagaagccggacaaattgctggtctggaagtaaaacgtattgtaaacgaaccgacagccgcagctcttgcctacggtctggataaggctcacaaagatatgaagattgctgtattcgaccttggtggtggtacattcgatatctctatcctcgaattcggtggtggtgtatttgaagtgctttcaacaaatggtgacactcacttggggggcgatgacttcgaccaggtaatcatcaattggttggtacaggaattcaagaatgatgaaggtgctgacttgactcaggatccgatggctctgcaacgtttgaaagaggctgctgaaaaagctaagattgaactttcttcttctacaagcacagaaatcaacttgccgtacattatgccggtagccggtgtacctaagcacttggttaagacgttgactcgtgctaaatttgaatctttggctcacggattgattcaggcttgtcttgaaccatgtaagaaagcgatgagcgatgcaggtttgaacaatgccgatattgatgaggtaatccttgtaggtggttcttcccgtatcccggctgttcagaagctggtagaagatttcttcggcaagactccttctaagggcgtgaatccggatgaagttgtagctgtaggtgctgctgtgcagggtgctgttttgacagatgaaatcaaaggtgtggtattgttggatgttactccgttgtcaatgggtatcgaaacgttgggtggcgtaatgactaagttgattgacgctaacactaccattccggcacgtaagagtgaaacattctctactgctgccgacaaccagacggaagttactattcacgtattacagggagaacgtccgatggctgcacagaacaaatcaatcggtcagttcaacttgacaggtattgctccggctcgtcgtggtgttcctcaaattgaggttacatttgatatcgatgccaacggtatcttgaaagtatctgcaaaagataaggctaccggtaaagaacaggctatccgtattgaagcttccagcggtttgagcaaggaagaaatcgaaaagatgaaggctgaagctgaagctaatgctgaagcagataagaaagaacgtgaaaagatcgacaagctgaaccaggctgacagcgtaatcttctctactgaaaatcagttgaaagaattaggtgataagttgcctgctgataagaaagctccgattgaagctgctttgcagaaattgaaagatgctcacaaggcacaagatttggctgctattgatactgctatggcagaaatcaatactgctttccaggctgcaagtgctgaaatgtatgcacagagcggtgcgcaaggtggagcacaggctggtcctgatatgaatggtggtgctggccagcaagataacagcaagcacggagataacgttcaggatgctgacttcgaggaagtcaaatgattccgataaggaaacagataataaacaataagcaaaagcgtgcagctcaatgagttgcacgctttttgcgtttatggggttcatggttgctatgcggtttctatgggcttttttatctcttatttgcgacatgtttgcgacacgtcttatttggcgataaggtacaacttagtttgatataaaccatttaaaacgagaagaatatgccaagaggaaattacaccattcaaagaagttgtgaggagtgcggtaaaatctttactcctcccacattgatgtcaaagtattgttgtccaacctgttccaagagagcatacaagaaaaggcaaatcgcaaaagaaaaagaggcaatacgccaagcattggtcaggcgaataccatccagtaaggggtatctgacagttaaagagtctgtactgatttacggcattagtaaagatgtactttatcgtatgatacggcagggattgataccatcatacaactttgggcaacgtctgacacgccttagtcggcagtatatggatgaacacttcaaaacaaaggatggcagtagaaaaagaaaaaaggatgcattgtcctttgaacccaaagactgttatactatcggagagattgctaaaaagttccatatcaatgacagcagtgtctttaagcacatacgccgtcattctattcctacacgccaaatcggtaattatgtttatgttcccaaatctgaaattgataaattatataagtcgttatgaagaaagcattaccccataccaaagtgaccgtcaagctcagaaggtcgaattacaaagaagagtggtatctgattatagagtcgtacccggtttacaagcgaggttctaaacgggcaagccgtgtggtggaatctattaaccggactatatccacacccatttgggataagtcgtccattgcacgtatcttgccggatggaacattcaactataagcctaagcgtgatttgaatggaattatccaatgccgttcaacgatagatcaagaggcttgtatctatgccgacaatgtgcgtaagttacgccagcacgaatacgatagtgccgtcctctacactgataaggagaacgaaatcgcggcacaaaatgaacgaagcgaacaggactttatcaaatacttcaatggcatcatcagcaaacggcatccaaatagctctaattcaatcatagtcaactggacccgtgtgggagaattgttgaaaatctattcgcaaggcaacccgatcccgtttaagacgatttccgtaaaactacttgaagacatcaagatgttcctgttacgtgccccgatgggaggcaataagaaaggtactatttcacagaatacggcatccacttatttctctattctcaaagccggattgaaacaggcgttcgttgatgaatatctgacggttgacatcagcgcaaaaataaaaggaataacaaacatagagacacctcgtgtagcacttaccatgaatgaagtacaaatgttggttgatactccttgtaaagatgatgtcctgaaacgtgcattcttgttttctatccttacaggattgcgacatagcgatattcaagcattgaaatggcagcagattcaacagacaagtaaaggtacatggcaagcggtcgtggttcagcaaaaaacgaaacgccccgattataagccagtcattcaacaagcccttcaactatgtggtgaacgcccaagtaatgatgaagcactcgtttttgagggattgacagatgcctcttggatttcccgtcctttgaaagcttggatagaagcatctggcatcaagaaacatatcaccttccattgtggccggcatagctacgcttcgctattgttggaaaatggtgttgacatatacaccattaagtcgttgatgggacatacaaacgtcaaaaccacgcagatttatacgcatatcgtaaacgaacaaaaagagaaagccgccaatacattacatataggaaatttggacttataggttatagtggagacttccaccattgagcaccagcgacttatataataccaacgatacactcaccaccgtttacccctcatgaagcatcgcctttttgaggggtatcttgtagtatatgcgttatcagggatgatattattattggcaataatgttttttccccattttattatctcttccaaccaatccttaggttaatgaaaattaaatccgtcggtggcaaataagtggcttgttggtggctttcaagcacctatttagcactcataaacatccctatacttttgcggcatcaactttaatacgaagaaaaaatggcctataaagtaaattcattggaggaaatgccgaatgcgttgtcctacctgattgagtctgtagaagcactacaatccaaagtaaatgccttgcaacataagcaagcaagtaattcacccaagtggatggatatagacgaactttgtgcttatctgccatcacatccagccaaacagacagtttatggatgggtatctaccaaacagattcccgtacataaaataaataaggctttggctttcttgcaatcggaaattgacgattggttgaagaacaaatcgcacaaaacccaagatgacttaatggaagaagccagacgatttgtcgaatctaaaaagattatcagatgatggaaataacagattattgcttttcattctttcgtaagcccattcaaaacatcgaaccgataagggctgtgggcattgtggatgtgtatcgttatgtcatcgggcattatgcgcaaccacaaaccgagtccctgcgttcgatgctgccttctctcgaatccaaaagatacaaagccacccatttcgactattgtactttttcgggattattccgcaaacggaatgaaaaggaactgattatgcactcaggattgatgtgtttggatttcgaccatgtggagaatatcgtggagctaaaacagcaattactcaatcatgagtatttcgatacggaactgttatttgtcagcccatccggtaatggattgaagtggataatacctgttgacttgaaaggatgggaacattcccggtacttcaaggctgtcgccaactgtatcaaagcgacaggtttgccattagtggatatgtccggcagtgatgtggctcgttcatgctttttaccccacgacccacaagcatatattaaccctaaatacaaagatgatgtcgaagaaaatcttttccgcccaagattgggagaatgtcccttctgaaatactgcaaacacatacgcctgatattgctcctatatataataaggtaaaaggcgatgtagaaagtgttgttcgggagatagaacaacgtgccattgatatagcacccaattataaagattgggtggagttgggttttgcacttgttaatggattaggagagaacggacgggagtattatcatcgcatcagcagattttaccctacttatcaaagggaagaaacagacaaacaatatacgcattgtctgcaatccaaagggcaaggcattactgtccgttctttcttccatttggcaaatcaagctggaatctcattggctctgtccggcaaggaacatttatccattttgccaaatatccaaaatggcaaaacgggcaaatggataaaatcagaagaagaacttcctgcatttcctgaatgtgtgtttgagcatcttcctccttttctaaatgaggttgtcaacaattccatctcggcggatgaccgtgacacgatattgattggggctattgtgtgtttgtcggtatgctttcataatgtttgtggtgtgtacgatgagcgcattgtttatccgaatctttatctgtttgttgtagcagatgcaggtatgggaaaaggggcattaaccctatgcagagaactggtagtacccattaaccgccatttgcatgaactttcaaagcgattggaacaggaatataaagaagcgatgaatgcttatatcaaaggtaagaaagataatggaatgactatgccagccgagccgcccatgtgtatgctcgtcattcctgccaatagcagcgcaagctctttcttgaagatactgggagataatgacggagttggactgttgtttgagtcggagggcgacacgttaagccaaacattgaagtcggactatggcaattattccgatgtgttgcgaaaggcatttcatcatgagttggtaagtttgagccgtcgcaaggatagagagtattgtgaagtagctaatccgagagtttctgtagctttggctggaactcccgaacaggtaagaagattgatacctgatgcggagaatgggttgatgagccgtttttgtttctatatcatccgcttcaagcgaggcataagaaatgtgtttgccacaagcgatatttctcaatccaagaacgcaatgttcaaactattgggagataagttctgctatctgcatgaagaatttgtacgacagggaaattattccttttcccttccctccgatttgcaggaacactttattgaatatctcagccgtgtgaatgaggagtgttgtgacgaagtggataacaagatgcaaggagtagtcagacggatgggactaattgcttatcgtataatgatggtgttgaccgctgtccggcatttggagaatgtacatcgcaattcttcctcacatgacaagacagagcaactggtctgccatgagtatgactattctacagccatgaatatttgcgaaaccttactttatcatgccgtattcatttatcagaatttgtcaggaaatcagtccaaacgattcaatttcgcttcgcaagagaccggcgtttatgcacgaaggaataccctttataatatgttacccgatactttcacgaagaaggattatgatgtacaggtttcatctttgggtgaaaatggaagtactgcaaacaagtggatagaagcctttatcaaagatggtaagctatgccgaatagagcaggggaaatataggaagattttttgagtggcaagtttgtgttttagtgccactaaaacctatacggcaagctgataaactgccgctctcaaaaaatcaattcatgaacattgaaagttaagataaatatgaaggagaagaaacttggcggtcgccctaagttggcgaactatcagaaacgtaccaaatgttttcgggtaatgtttaccgagaacgactatatctatatccaatccaaagcggaacaggcaggattgtctgtcaatgaattttgccatcaggcggcaatggattgtcaggtctgtcagcgtatcagtccggaaatggcatcggcaatccgtgacctttccggaatcgctaacaatgtcaatcagattgcccatcagatgcacacttatggtttggaagcagtcaagcaacaatgcttttcaatcatatcagaagtcagtagaattatcacccaagtaaagaacaatagccatgatagcaaagattaaaacaagagcagatttcggaggaatagtgaattatgccaatgaccaaaagaacaagaagaaatgtgccatacttttagcacacgaaggtgtctgtgtcatcagtaataaaaccatagctgattcttttcagatacaagcgtccatgcgcccgaaagtaaaaagtccggtgaaacacgtatcacttgctttttcttcgtacgacattagtcgtttccctgataacgaagaaggagatacgctgatggtagagattgctaagaaatggatggaacaaatggggattcgcaatactcaatatatcataacccgacatcacgacacgaaacatcctcattgtcatttggtgttcaatcggatagacaatgatggcaatctcatttctgacagcaatgaaagaatacgtaatactaaagtatgtcgggctttgactaaagaatatggactgtactttgccccaaagaatagtaaagccagaaacaagagtcgtttgcgcccttatcaattacggaagtataatctacgttctgcaactcttgatgcactggctgtatctcgttcttggaatgattttcttggcattctcaaaagtcagggtataggtatgcgctttaatcatacagataactctgataaaattcgtggtatatcattctgtcaaaatgagtatagtatagccggttctaaacttgaccgtgatttgagttttaacagtctttgcgctacattgggtaatgtggcagcggaactggttgttcaacctcatcaagccataacttccggtggaggtggaggaaccagtaacgaacaaggatggcgagatgacaaagacaagggaaaacaacaacatgaacttttttataaaccctcaaaacgtagaagataatgaaagaagatgtagtagctgcaaatcttgcaaatttgcgccaaagtatcaacgagctaaaagaatgtattgaaaaacagaatactacagtccctaaaccagagcaatcagtaaaagtggacttcgatgaaaagaccatttataatggagtcgccaaaagtttctgtacttgctggaacgatgcgttatcagtggtgaagaagcatatctggaagcaacaatcggacacattgccgttctcgctatggtttccgaagcttattgaattattcaagcagaagtccagatttcttgaatatctttatcggcacgtttgcgattataatctcaatcgcatgaatatcgaagcaaataccgaaagcatattaaaacggcaggatgagatatttgtcaaaatcaatgagttgaaaagtcctgtaaccattattccacctaatatcaatgggatgtttatacgtggacatcatatcaaacttcgatatgccgtggtcttcgttgtcgttattatggtgtgggctgttgctgcttctgttagtagtgtgaagtataagaaagaatcctttgcacattattcgatgtatcgggcggtgaaagaacaatatcagcatttacaggaaatgacttatgaaaaatctcaaattagaatcaagtaaagcatcttcactctatgattattattagtctttttgtgtgatgcattcggttctgacccataaggcaatcattatcttctacggtttggtaagttttgatttttctatctttgggaaacatgtattattttggaaaagaaaaatgaatagttttgcctattttgcgtgaatttttataactttgcgcttaggcgaaaaataagcatgtatttatgatacgattactcctaactactataatgtctttttccttgtttggctgtcaaccaggaaagatagaccagataataattgggatgtttgcaaatgcacaggaatcaccagaggcaaaacaaacaatcttaacgcaaaatgcaacagaatccgtaagcatcagccaacaaaattatcaaggtttggaggttccggcctattctgacaacgattttatcctaaagaggactgcttatactacctcatatgacaaggtgaataaaattccgaagtgggtggcttggcatttaatttcagaccacacaaatggtgatcagaggagattgtcaaactttattgtagatgatgaggtgcctgcgccacgagcagaacttgttgattacaaaggctctggttatgaccgtggtcacatgtgtcccgcaggtgacaacaaatggggatttgagccgatgagggagtcgtttttccttacaaatatatgtccacaggatcataatcttaactgtggtgattggaatgagttggagatcgcttgccgtaattgggctaacaagtatggtgacatctacattgttgcaggccccattttgtataagggtaagcacgaaacgattggtcctaacaaagtgactgttcctgaaggattcttcaaggtggttctgtgcatgaatggcacgccaaaggctattggctttatctacaaaaatcatccatgcaacaatccacagtcaagttatgttaatagcgttgaccaagttgaacgtatcactggttttgacttcttttataatttaccagacgatatagaagaaaaggttgagtccaacgctaatctttcagattggtagttttctttgacttagcctgtttactatcgcatctattgttgattttatttactaacaccatatggatgtagaaatccaataagatggcaacaatgcaaatcgccacataaatccattgttcatacaaaccataatatacagatgccataagtaatatcaacgatataattgctgtagtcgctgatactatatgcattataaaattattagaaaccattttgaatgtcgttttttcttttttgctgcaaaatactatctgtaatttctttctgacgaatagctttttgttcttcttgttgttttagtaatgctttccgtgcttgttcttgcttcttctttttctgttcttttgcgactcttgcagcttctctacgtgctaatctttcttcttcgattaaaggtatgacagaatgtggattatatattatgatgcctgtgaagcgttgagactcgttgtaatacgaataatatgtatcatcaccaccattccctttaaattcacatatcgaggccactataatatgcttatcatcaaacaaccactttgctatataattagcagaatcttttgaggtctctataggatctccaaatttctttctaattgtcttagataacttttccgccttaaagcatccgtcttcagaactactctccgaatcacgtaacacaataccttgtaacctttttcttacgaaaataccatctaatataaaattcactccatcaagcaattcgtacttcttgaatttattatcataaacctctggatacatatatgaataccggtagtaatcattgtcatattcgttcttgttcatatcatagaatgttttagcaagcattccgacacgaaaatcaagatacaaattctcggcatcctgactcgcaattctattatacagattatatatagtagaagatggatggattttacattcgtttaattggttttctaaaataaatgctatgtatttattacaatcttcctctatcttagacagatactctgtattatacaacttttccaaccaagtcctttcgcctttgaaccagcgcacatgtgtaattggtaaacatagaagaaggaaggcaaatcctccatatactatccacaaatacatgtaaagtacagcatgtgtgctcgaacttttatatatagatttggcaattatttctattccgtacaatagaaacaacatgagaagaatttcccaagtccaatataatatgatggctattataactatggctataacatattgcataaatttactctttaagagttcaagcgtctgcgatagttttctaatatacgtttctttgctatctcaatcggaagtcctttaatttcaacgccatttattttctccaacttatagatgattgacatgagcttacggtagattgatggtagtttcaccttgtctgtcgtattgtcaatctcagtaataagatgctcaacttcggctacagcaacctttacatcaatatcgttagacgaaggagccgattgaaaaggagttggtgtagatgggggtgaaattggaacaggctgcgtgggtcgtgtcgcattcgtgtttggttgtggagtagaagccttctttcgtgacatgaagaagaaccaatataatccagcaattactgcaaccaatgcagctgttatgaagttgcttgaaagtagcaacgaaagaattacagacgcaacaatgaacacaaggcaaccctgttttgagaatccaaatgttgtctgagtagtggcattggttggaggatttgttccagtagttgaagaactatttgattttgatcctccacccactttttgacggtaataaagccccgtacctggaatacctccagatacataaattccacgcttgccaatgttcacctttgctcctttaggtcccattgatatgcttggtccatttttgctccagttaattcgtacacctggaagaattttagtgcttctacgccaatataaacccattctttttcgcgaattttgcttgcaaaattaaaatttatactctaaaagcaaaaaattttaatgggaaatacgtataaatcttgttgctttgaggaaaagtaattacttttacctcaaaaagtataactcatagcagattatgacaacattaagcaatgaagcttttgcagtaatggcagcctgtgaacgaacaaaacaacctttcggtataacagtcgataagatttgttccggtcaatacaagttcgtgtgggctttcaagattgacaaagagaaagcacaacgagaaggctatggcaaaactaatgtcaaaggcaatataattttggatacagaatatccaggatgcccttattgtggtgaaaaacgacacatcgtttgctcatcatgtaacaagttcttctgctaccatggacaggaacatgttacatgccccaattgtggaacgagtggaaatgtggtatcaatagaacaggttgacctaaaaggtggagattattaaaattgaaatatgatggcagatttggcaaaaggaagaagaatctctctcacgaatggaggttgtgtaaccatcatcaaggaattaggtagaggtggacaaggtattgtctatctcgtagatttgaatggcgaacaaaaggttctgaaatggtatctgactgcaccagacgagaagttttacagaaatctcgaaaagaacatcatgaatggtgctccttctgatgcattcctgtggccagagcatttgacaaaccgtcaacttggtagctttggttatgttatgcaactgagaccaaagaattactatgagttcggcaattacttgctcgccaaggtttgtttcaagtcttttaaagcaatgttggctgcagctatgaagatttgtgacggattcatgatgcttcatcgttgtggctacagttatcaagacctaaacgatggcaacttcttcatagacccaaccaatggcgatgtgctaatctgtgataatgacaacgtaatgcctcagggcgagaaatctggcattatgggtaaggctcgttatatggcccctgagattgttgctggtggaattccagacaagagaagcgacagattctcgctttctgtcattctgtttatgctcttctacgctaaccacccatttgaaggagaacgagtcattgcatgtccttgtatgacggaaagctatgagcgtaagttctatggaagtgaagccatctttatttatgatccgacaaataatactaatcgccctgtgagaggaatccatcagaatgtcatcaaacgttggtttgtattcccatcgatccttcgtgaaactttcgaacgtgagttcagtcaggattatctacataatcctgagaaacgaatgattgaacagaattgggagaagatcatttcacgggttcgtgatcaattagtcatctgtccgatctgcaaagaagaaacctttgttgaaaccaatggagccgttggcaagtgtatcaaccgaggatgcaacattgacatctccaagcgtctgtttatcaataacagatcattgcctctcacagataagaccgaaatctttattgataacgataatacgccagatgcaattgtttcaaaagatgccaatggcgtattgataattaggaatatctcatcagacaaatggacggtcgaaacgccaagtggcaaggtaaagaccgtagaatcgcaaggtattatgcctgtaaaagaaggattaaaaataatgttcaaaatccgtgagataccttatcgaggagaaataacaaatatttaatttttacaataatgggacttttagatgacgtggtaagtgtcccacgcagaacaatgacacttttctttgtaatcgacacatcaggtagtatggctggtaacaagattggtgccgttaatgatgctgttgagaatgtacttcctatgcttgatgagatttctgcatccaatccagatgccgaaatcaaggtagcagctcttgagttttcaagtggttgtaactggctttatgacgaaccaaagcttgcatcagagtttgtatggcaggatgtaactgcaagtggtctaacttcacttggtgctgcttgtcaggaactcaacacaaaactctctcgtaatgggtttatgcagactccaagcggaagttttgctcctgcaattattctcctttctgatggtgggcctacagacgatttctatggaggtttgtcaaaactgaaggcaaacaattggttcaagaatgcgatcaagatagctatcgccattggtgatgatgcagacaaggatgttctcactcagttcactggaacgaatgaggcagtatttacagttcacaatattgatgctttaaagcaaatcattcgagttgtagccgttacctcttctcagattggtagcaagagtagtactgctggcgataccacaaagcaggaacaggttatcaaggatgtaaccgaagcaaccaaggatattaacggagctcagtcagaggctgctcctgtgaattctactgataattacgacgattgggattaaactaaggtttctttgatggagaaattagttcatttttgtcaaggagaaagccataaagcaacaggtaaagtatgtcaggactatgcaatgtgtagtactgataatggtattgcagtggctgtcttgagtgatggacatggtggtagcaggtatttcagaagtgatgtcggttcaaagacaatagttgaatgtactttcaagaaagtaatgggatttgttgaaaatatagattccagcatatttgagggaaaaccatttacagcagtatcggcgttgacaaccgagcgcaaagaagagaatctacgaaagaatagtaaagtagatgatcaactgaatcagctgtttaagtcaatcatattcggatggagaactatggtagaacaacatgcaaaagaaaatccatttaccgatgaagaacttaagttgattactgacccacaagatcctcactccatagacaagacatacggttgtacattgatgtgttatgtcagaacaccaatgtactggtttgctttccacctcggagatgggaagtgtttctcttttgatggagatggtaattggaatgaacctatcccttgggatgaacgatgttttctgaataagacaacatccatttgtgatacagatgcgctatctgaattccgctattgctatcaaggcaatggagattatcctgtagctgttttccttgcttctgatggattggacgactctttcggagagtcatacaatcaggcgaacttctatattcagatattgaagctcattgctaacacgtcaaacaatgatgcacagaaagaaatagaagatacgcttccgcagttaagcaagattggaagccaggacgatatgtctgtagcttgcctatatgacgaaaaggaattagaattcattctacctaagctcatactatggcaaagaagcaacgtggagaaacagatagctgctgttaatgagaaaattctggtagcaaaagctaagatgtcgaaatactctcctcttaaattttatacaaagaaggaattgatagaggcccagtatgctcagacagatattgaacgactgtttatttccaaacgagaactagttaccaagtataaccgattcacaagtgaactcccatcaacatcgtctcatgcagattacgatgacgaaataggattatatgagtataaggaggaggaaaagcgccaaactctgactgcagaacaaataagaaaacgtttgagagttttgagtcatccgatgtataaattcgatatatgacatgaataaaaaataccaattacatacaggcataaaggatattatccaaacgaatggtacagaacccatccgaaccgttcagttggctaatatccttgctgactattcagcctacgatgaataccctgccactaaggttgttctgaaagatgtactgaccactggttatgggcaacgcatttacaatgccttcaacgagtctggaaaaatttatcttgcagaaatagaaatgattaagcaagattacagcaaaaaatcaaagttcaagaaagacgttgtcaattatgtgttcgactctatatgctacggcttaggactaaagacagccgtcaaggaaccttcaagcaatagctttgacccatacataaacgagtcggataacatattggataaacttccaggaatgttggcagagttgaagaaagaatatgatgaggcattgaagtcccttcttgtacttccaaaagatattatttgggatgcagttgcttattatccagcgtcagcagagaatcagctgtatttgatagaaggtaagattcatgtcatcagcaatcaattaggtatcaacgataacaactggtgcaagaatctgaaggaaaagactttgaacagtcatagacagaggaaggtaaacactgtcaaagaagtactggatgcaaagaagatagatttcaccaacctattgaatactgcacttgtcaagccatcagcttcatacatcagcaaatctggacactatgcttctgataaactgtctgacatcgaaaaaatggaatcagagataaaaggtctgtatggtgaaatgggtgttaagtatgatgattggtgcaaaacagaaaaagacagaatcttgtcatcatacattgtttctgatagtagtcgctttcgtcagatgctgttgaagatagcaatgcctgcagccatgttctgcggagtcggctattatggtggaacttatgcggtatctactgacgaaatcaacgtttatgagcaaaggatgaaagcagcagacggttatcttgccaatggaaattacggaaaagccattgcaggttttatacaagcctccaacctgtatgacggaagtttcagaacatcatcttacaaggaaggagcattgtcacaagcagatgtttgtttcgcaaagatgcaagaccaagtaacttctttgatagatagaaagcaatacggacagatacttgcccttatgaattctattccaacggaatacttggctgcaaatcagaataagagcgactggattgaaaaaaccaaaatagatttgcaaaatacagtatcagaagaagttgaccaactggcagaaataatttcgttcaacggaggccatctaacggaggacggtaagaaataccttgatcaacttctggctgtatctcccgacaactattggttgaaccttattaagacgaaagaaaaatgaagaatccagcaaaaaacaaaataagggcattgttgctttctgcagctacagcactattgtcaactcatgctcaagcagaagaaaccgccactattatacctgactttgtcaataatgatgatttcttcggtgagactaaacgctcatggggaaaggtattcaagaatgtagcaaaactcaataagaatggtgaagtgaaatacattgcaagccatcgttcgcacatgtcacatcgttcaggtggtggcggtggtggatctggtcacaggtcacactactctcattactcatcatacggaggtggttcaagtcattactcatcaagttctcgtagcggctcgtattcttacagcaaacctaagccaaagacagcaggtgattattcaatcggtgatagaacattaaagactggtatccatggaagtgacgtaacctcacttacaggctaccttgcaacagctttatacatcaaccgttcttggataaaggaaaaggagggctattctctctatgatgctaccatagcatcagcagtcaagcacttccagaaggatgcaggtttgcctcagactggtattgcagaccaaactaccattaacaagttgaagtcatggaataatagcaagacaaccgttatccttggtactcgtgagttatcatattcagaatcatcaaccgataagggtactgatgtgacagaacttgtgaacctgttgactaaggctggattcgctccagatccgaagaagattgtcatgacaaatgatggtaggacagagtttactaaggatattgcaacagcagttcgtttcttccaagcatacaacaaccttagtgttacaggaagagctgatgaggcaactatcaaagcgttaaaaacaaaggcacaataacatgaatagaatagcatcaaatataataaagtctttattagttgcatctgtattttccatatcgggaaatgatgtagaagacacaaacgattatatgtatactgtaggaaataatgatgatgaacaagcagttacaagtaagaagaaatctgttataaaaaacatcataaaattaaatggaaatggtaagttcactttgattgctggccatcgttctcattattctcaccgttcacattattcagggagaagaagcagatgcacttcatttaggtcacctatggaaatggtgttgggagacagggctatcttaaaaggaatgtatggggctgacatagatatgttagctgcgattttggactctaaaggtctatacgataaacaacacgtgactaaaatcaaaggtatgacatgttttgatcttagaatggagcaatgcataaggaatatacaggcaaagtatggtatgactgtagatggagtatgcactcgtgaggttctttccaaaattctataacctatggagataaaagtagatagaaatatatattcggactcttgtatatccaaagttgtatatctattgtctgaaaaatttagtatagcaagaacctttgtcaacaattacgagattcttacaataattcataaaacagacgatgattttgatgtcaacgatttttggaataaaatgaatgattttaagttaagggaaatcatcaatacagagaccagggacattaaaacaattttatatgcaaaggcatttggcgaatttgacaatttagacgaaaatgatttcgattaataagtatcacatacttccgtttaactttatcaggatcaagaataaagaggttttgataaatgaattaggggacatgattgtcgttccgattggtaccgcatgccgtttagcgaacaaggaagctattgacgaagagttattcaaaagcctttatgccaatttctttgtaacaaacaattatttctccccgttgatgaatgtctatgccgctagacttagggagaagaaaggttttttggacaactttaccgcactccatatattcgtcctaacccttcgttgcaatcagaattgtgtatattgtcaagcatcaagtcaagatgaggtaagcaaacattgttctatgagctttcatacaatgggcaaagcagtggaattgatgtttaagtctcgctctccatttcttacaatggagtttcaaggcggagaacctacattggagcccaagctgattagatatggcatagaatgcgcagaagaaacaaacaagactgagaaaaggaagatagattacgttctctgtacgaatagcataaatctgacagaggagataatggatatttgtcaaacctaccatgtgttgatttctacatctcttgatggtcctgaatggctacataatagaaacagaggcaagaaagatagttatgagaaggttgtttccggcataacaaaggcaagagaattattagggtatgaccaagtctctgctttgatgactgcatcggaagaaggtgttcttcacccaaatgaaatagttgatgaatacgacagattaggcttcaacagcatctttctaagagcattaaatccttacggacttgcaagagataattccgattgggacgtatatacagacaagttcattgatttctacaagaaagcccttaatcacattatagagcttaaccttaacggaaagtttttcattgaggagtttgctgctattattcttcgaaagatgttaacacctttctgtacaggttttgttgacttgcaatcaccggcaggcatcataaactctgtccttgtatataattatgatggctatgtgtatgcatcggatgagtcacgtatgctggcagaattcaatgattacactttccgcttgggaagtgtggatgacaaatatgaagatattgtctatggtcagaaggcaagagaattgggaaagatttggtgtaacgagacgatagcaggttgctctgattgtccaatacgaatgtattgtggtgctgatcctgtacgtaactattctacccaaggtgatacgtatggttacagaccaaactcatggttatgcaggaagaacaaggccatcatcgagtacattatagaattaatagtaacgcgtcatgatgaggtgatgccgatattcaaaagttggttggtatgaaacaaagaccattagacatattatctaacgacaatactttgttctgtacggaacaatgtaacaatcattgtttgatgtgctgtcaaccaccgataaatgttgatgacattgattggttgtacgaagaaaacctgttacgcatacaaaacgctcccaaggatttacccataataggtattacaggaggtgagccaactttattaggcgaaaagctaatctctctcataatgtatattcgtgagcaacttcctgacaccgatattcacattcttagcaatggtcgcaatttcagagatgcagattacacatctaccttaatggaagttggtgaaggacgtatcatcttcggcatacctttacattccgatttttataaggatcatgatataattgcaggagcaaagggtgcttttgaggaaaccataataggactgtacaacttggcatctgtaggagcgtgtattgaactgagaatagtaatgaataagcttaactacagaaggttcctgcctatggcagaatttatccacaagaatctaccctttgttgcatggatagcatttatgggtatggaatatacaggatatgccatcaagaactctaaaaatatttgggttgagccgaaggattatattgcacatctattgaatgcagtgaaatttctggatgaatggcgctacaatgtgtgtatatacaacattccgttgtgcctcttgcccgatagcttccatgatttcgcccaaaagagcatatcagattggaagaacgactatcctgacatctgccaagaatgtaaaaagaaagaaatgtgttgtggattgttcacaacatcaataaaaccatacaaaggattaaaagcgatacaataatgggaaaaatcagaatatgttcaaaaccgccaaagccaatcgtttcgctttcagaaacgtacactgtattaagttcttacaaatcgggaagagtgaccttgtgcttgacccctgatggtgaatacctttttacagtctatggcgatataagcgagtcaacagcaaaacgaagctctacccataaggccacagagcagaaaatgaccaacattatgctcaagatgtatgaggatgcacaggatgcttatactgtaatacaaaagaagagtaaattacgtttggcttcatcgtattctgttcagcagaatgtaaaaccacaagacgcataccagtggaagacattggatataaagaaacctacggacaacgaaataaaagagcttgttatgagtgaagcaagaaatttggctcacaatcccaaaagttcttctgttagtgaatctgagtttgtgaaggcaaacttagagagcatgaagaaacaacgtatggacgcatggtatgagattctgacgttgttcaatcttattgaaaaagctcaagcagatagagccaatgcttctttcaagaaggaatatgatgcgagtgtaagagcgcaacaagaaatcattgatggcgagaatcatatagttgatgatgcctttcactcattctctaatacattgatggtgcctttcattatagagttggattacaaatacaatcaggcggctaagagtatcgacgttagcatagagctgactgaagatccttcgttgaagatgccaatgaaaaaagcaactctgaagacaactggcaagctatctgttcgcgcaaagacacaaggtgatgttcaacgggattatgcctacacctgtttgtcgctcatgtattatatagcatgtaatgtattcaatattactccgaacatacaaacctgtagaatagctttatatacagcgagaaaggcagaaggcatctgctggttggaatttaacagaaataagtttgccacattgcatctctcaacattagatcctctgttagatattgtggcctggcccaatgtctctaacttaaaagtactgaaaaccatatccaaactggaatgcattgagaaaacagcatttgagaatcagattaggtcacagatttcatctttaatgtagaatgactcgaaagcaactgaaagtaatgaacctactattggtgctactgctattgtggaatccaatagttttatggcaatactaccagagtatggtcattgcttttttattgcctataactatcgtgagcattggtttagccatttcgagagttcgtagtttgaggttgaaagtttgggcattcaaccttgctgctattgcgagcatactctttcatgcagaggtgattttcacgatggtgtatgcatataaagagataccgaacctgtatgaactgcatgggaaatactatttcaataaaccttatctcgatcaacagttcaatgaccctgaatttgtaacacgatacaagacaaattgtcaaggatatagagttgatgatttatcctcacagaatcagaagattgaaaaatgtgattggctgtttatcggagattcatatacacaaggtgctcaggtagaatacaatcagttgttcagctctttgatttacaaagacttccccgataaagtcatagttaatgctggtataagtggggctggtctttatgatgagttgaattatttcaaagacaagggcaaaaagttgtctcccaaagttgtgttccttcagataggagcttttaacgactttatgaatatcagagaacatcagccatccttacaggattacatcatggagtggtcggcgctatatcgctacttcgaatataacatagccaatagcgatgagttgccattaggtagatggacggaaccattctttcctaacaaggaagataatatcgacaacaatatcttcttcaaacaaacgtctgattacaaggaagccgacaagagggctttcaaggaaagtatctcagaattcaaaaaagaagttgaatctatcggtggtaagttggtacttatctttatcccttcaaaagaacagatttcgccagaattgttgaaggaggttttagatgagtacaatataagcaaagaagagattgacctttctattccaaataaattatgccaatcggtagcgaatgctcttagagtggaactttatgatttgacaacagagttcaggcaatccaactcatttccattctttacacatgatgagcacatgaatgtagttggacaccagcttatagcagagaggattgtcaaagagttaagctcgataagtggtgggtatgactatttgagtgagggtaattaccatgagcgatatccaacgattcatgccgatggtactatggtgtatcagtctcaaacagaacactattataccataaatagattgaatatgaacaatggttatcgtgaggaattgtggcgaggtgttagcgaactggtacatcctatgatttcaaatgatggtagataccttgtgtttacagagggtgaacaagagtctttgaatacagatgttattctctatgacttttttaaaggacatcaagttgctattaacaagaaaccagcaaagggagctattccatgtgtcaataaatcggcgacaaagatagcctttccttcctggacaatggaacacacgactcccagcattgtactgtatgatatcgcaacaggcagacaaacgcaatttgaagatggtgtagaatgttggcgaccagtattttcgaatgatgatcgacatatctattatattcagaaagaaacacaagatagccactttgtgattaaaagctatgacgtagcaacaggcaagaaatgcgttgtattaaagcatccatacgatatttgggatattgcggtatcaccttctgggaagtacattgcttatgcaggaaacaaggatacaaattgggatttgtttatctatgacatagaacagaagcaaagccgacagataacacatactctcggtgatgagtgggatcctgcttttggcatttctgatgatgaactatggtttgcaggtgtcttcggcatcaatgatggcatttaccatataaagctaaaaaaatgacaaaactatatcagatattaatatggttgtcaagtgtaggtgtattgacttgcttcgtcaagatgtatgtcttgatgtttcttgttatgtctgttatcatcgtgttatcttccaaattcataggaaagagcctgagtaaagctgtggtaattactgatatcgctgttctcgtttcggcattctttacgttgaagagttcgttgggattgatccttcctttgggttattctgtatttgtattttctgcaatatctttgattataaaccaatatcgtgattacaagaattatacagctttggaaattctctgttacttattcttctttccaaagatatttgcaggcccgattgatagagccgatgattttgttagacaactgagagggaagaagaaacctacattgaagaaactttatcttccaatcaagatgtgcatctttgcgtgtttctataaatttgtcattgcagacagattatatatcctatgcaatgacgactatgatggattgaatgaggtttgcagcatcttatgttatggagtggctttcttctttgatttctatgcgtattctatttttgccgttgcatttggtaaattgttaggtatagatcttccagagaactttaattcaccatattgtagcaggacatttcgagatttctggaagagatggaatatcacattaggaacttggttgagagattacatttacatccctttaggtggcaacagaatatcagcaaggcaatggatattgaatatcttattggtttttgttattagtgcaatatggcatgacttgtctatcccgtttatcgtatggggaataactcatgcgatacttttaataacggaacgaaaccttaatatcaagggcaatagatactatggggctttcgtctttctggtttgcacccttctatggcaattgtttgatgttaatgagattgaagattttgtgtttcgtcttataaaggttacggaatatcaacctatagacaattctattgtggttggagtatttgtttctttgtgtgcattatggtttgctgacagaagttctaccaaggatatcatattcagacacaaggattcggatcgctatattttgaaagaagttccaataacaagtataatttttgtgcttgacatcttattggcaaataatccaagtataaatttcttttatatgaagttctgatggtcgtattgggaataactgcatattatcatgattcgtctgctgcactaatagtgaatggacaaatcgtagctggagcgttggaggaacgtttcagcagaaagaaacatgataacaggttcccgattttggctattcagttttgtatggaatacgcaggaatatcattagatgatgtggatattattactttctacgagaaaccattcaggaagttcgaacgcatcattaaggatagtattgtttatgctcccaaaagttatgatcgtttcttgaagtctgttcctatatggctcaaagaacgactgaatatgcgaaagaccataaagaaagaattgaaagaagtctatagtcgtgttaaggctgacattcgatttgttgatcatcatctcgcacatgcagctaacgcatatttcctatcaccatatcaggatgctgcaatactggtattggatgcggttggtgaggattctacaacatctatttatagtgtgtctaacgataaaattactttgattcaacagcaaatttatcccaactccataggactattgtattctgcctttacgtatttcttgggattcaaagtgaactctgatgaatacaaggtcatgggattagcaccatacggcaacaagaattcggaagaaacaaatcgctttgtcagtataatcaaggataatcttgtagagattcatgaggatggaggtattgtgctcaatacaaagtacttctctttcatgtattccgataagatggtcaatgacaagaagtgggaaaggttatttggtctcagtaaacgagatgttggagaagaaattaccatatctcacaagaaccttgctttggcaatacagttaattacggaagagattttctgtaagttagcagttactgtaaagaacatagtgggtaagacaaatctatgtatctcaggcggttgcgctttgaattgtgctgccaatggtgtattactaaagactcacttgtttgacaatatatatgtgccttatgctcctgatgattctggatgtgctattggtgcagcattagtttgctcatcattgatgaatggtaagattgaggatacttcattcataggtcctgagtatgatgataagcgtatcgtggcagcaattgaatataacggattgatatacaagcatcttaaagatgcagaattgtgtgacaaagtaacagaactgttgcatgaaggaaaagtcgtcggttggtaccaaggcagaatggagtttggaccacgagctttgggtaacagaagtattcttgcagatccgaggaatacagagatgaaagacaagatcaactccaagattaaatttcgtgaagagttccgtccgtttgcacctgtagtactggataagtatgcagatgagataatggaactacacggaacagaaagcgaacacatgatgttcacctacacaatgaagaaaaagggatttgatgcagttactcatgaagatatgagtgcaagaactcagattctacatagagaatataataacaagctatataaattgcttgaagcattctatgaaaaaacagaatgcccgatgttactgaacacaagtttcaatgtcatgggtgaacctatagtatgcactccggaagatgcaattaggacttacttaaactctggtttggatgctttggtaataggtaataatttgataaagaagtgatatggatttaataaaggaactatttatatacatatactcacaacggaaatggtggcttgcaccaatcattctgttgctgttgataattgggctattcgtaatctttgcagatactgcaatagcaccattcatttacacattattctgatgaaaaagatttttgcacatatcaactccgttggaaagattgtaaacaaggctatcgttacggtcttgttgacacttgtgtggttatttgtgataatgccatatcatatattcatgcacagtaacagaggaggtagatggattattttcaacaaaacttatagtcaagacgattttattcacatgggataaaacattggattatgacaagagaacaaatataggacatcattgaaaggacagaaccctcaacaaaggcagggatattcagtaaatgtctctaaaaaataagatggcatatgaagatgatagggcatgaccatttcatatgccattcttattgtcatttttccgtgctttctcacatacttctatccgacaggacatgacgttccggaagaagtctgatgacctcttctgattctgtgagtaaaatcatatcatgctgctttagctgttttgtttctgattttttctattatcagtatggcatttgccgtatgtattccaaagaaaatccacagtatttccgtcttcctgtttctggcctttatccttgagagcgagtaatgttgcttttgagtgccgaagcttccttcaagccgtgttgccctttcttttgagagttcgcttctaagcaccttcctcaaaggctcatctttggccgcccttcccttgcgcacaaaggatgtggatatcccatattttgtacagaactttctgttggcattattggcatatatggaatcggcagccacacatcttacccttacattcataagcttctgctgcatacggatacagtccttcaagcgtataccctcattgaatgccttgaacgagaggtgttcgatgaacgatatgccgtctatctgtatattattgacctttgcaccgaactcgacggacttggtttccttgcctctgacgatgggacgtacataatgacggtcaatgctgacgatgcggtcactgactttcctcccttcaaacatttccttttcttgtacaagcacctttctgatgatggaaagacgcttatgataatcctgggtatatcggagtaaagcaccgtactcgctatggatcccatccctttgactgaggagcttttcaagaagcttgatcatacggcgcttaagcattcttgcccttgaagctctcctctttcttttcttgcagtaggacagataggattccgccacattcctgtatttgttgcgcggacgccttatgcccagctccctgcaatgccggcatatatgcctgtagagccattcgaggctttcccaaaggagtttcatgtccgtaggaaaacgcatgtggctttcatagcatgtggcatcggtcatgcagacgtgaaggttatcaagataaggtttccagtgtgaagccaggagctcctggaaagaatcaatgtcaaggcgggatgctatctcattacggatggcactgactatcttgaagttggttatgggaagggacgggggaatcataattccacagaaaatctggtagtgtatgttcccgttcagatgttccaccagttgcctgtcggagaatccggtgtatgccttcaggaccataagggcgatctttgcggaaggactgaatctgttcctgcgtcccaggcgccggtccgacaggccggcggcttttgccatacattcaaacggaaagaccgaatgaagcttgccaagctcactctcattaaaactcttgcggtatttttccagaatatcaaattctgtaaaacccaaagtagggtgaatttctgaaatattcactatctttgccatatcttattagtttggatatttcccccgttttggccgtcaaatcttattttcgggggaatacctaaagatacaaaaaagccaactaattcgcaatactttgtgtatgaattagttggctgattttgtaatatttaatgaatgtcccaaaggcaagtgtttattatgccaggtgttattatcgtgagcatcctgctcccttatgtttatgtagacttatacagtttacaataaaaatggcgtataccattttattttttagggatatttactgaatactcctacttaaatttattttctttctctctcattttctttatcttttcaactcccggcatctttttagccaatacactttctcctgcaggaaaataaagcggaaagacctgagataagaaacttacaatatcattacgcttcttacccatgttgaaaaaagcagaacaaacaaaatacataaggtcttgctgactacatgtatctttttgctgaatagatattgatggagcgattatcaagtcatgttctgcaaatgcacatgcacaggcaagaattgctttctgttcttcttcggtaaatatctttattttccctgccaaccattcaagttctctttgctgaagtgcttgttgcttttcattctgatgctccaatagaattgctacattttcttgttgcctttcggtcaaagcattttccaatgcttgattttttcgtttaaggacattgaatttcagcaatgcggcaatgtacatacagaaataacctactgcaatattgaatatcagaacaagcagataattgctgtttgaatttttggtattctcagccatatactcactgataggaataacagcaaatagcatgatgatggctattgcgtaaagcactctgtatcgcgttttatggtttacctgcggtaaggaggcaaacaaaaaggcgataatcaaaacggcaattatagcactgaatggtatgaaagatgttcccataggtttattgctcagtttgaggattaattacaatgcgccaatagccagctttatcagaaccttcatggatgagaatgcctctatctcgaagattctttatctgtttcttgacaccatccaaagagatccccaattcatttgccattttttcacgagttatcatcgggttagatataaccatatctattatacgctgagccgttctaccaacaggtttgttagtattcctttttacagggtactttttgggggtactattttcgtttacagggtactttttcaccgaactttctttgtttacagggtacttttcgagggtactatttaccctgttggctacttcttccacaggaattcttccgttttcgttccagttcagattatagaacgtggtatagaaagaagtcgcttccgtttgatattgcggttcttttccttgcaggaagttgggtagtttttccgtcaattctcgcattttgcgcaagccggagccacgtttttccatatagtccagctgtgtgaacacatccgcaatgacgggattgcgacgcatggaaggcactttgtatatgtcacggtcttgaatctgtgtaccgtcaagcatcgcaccgggtgataccagttctacgcgatcatcataaatatctatatgcacttcaccacccatcacggtataatccctatggataagatggtttaccaatccttcaaagatggcacggtcggagtagtcgggcagattcagacgatagcttggcatcttcacccatccactcatggtgtagttcttgatgaagtccatgccgtatttcaagagcaatacgaggttatcccgatgctctacggaactgatagcatcatctttatagagtcccgtccaacgggtgcagaaaatacgcgattgaaataccgtgcaattatccacgaacaataatccggcattggtcagtttaccgtcaggagtaaccagaccgaatgattccagatacttgtcattccattcctgatgggtttgttcacggaaagtattggcaaggatgatgaacgagtgcttgctggcatccacctgggtgggcagtgaatcccatgtcatgtgcgtacctttcaataccagcgaaagaagttgctgcgaattacactctacgctttcattgccaacccgtacatacgcggtacgtgttccgtcctgataatagtaataaggtgtaagcgttccagcctttactttcacttcaagcaaggagtgtccttcatgttctatcgggataagttgtatttccggtactgggtcaagtcttgccttgatggtttcgctgataaagtctgcatcagattgtgggttctctaaacctacaatcactccatcatcgttcactccatagaacaagctgccgccatccgtattggcaaaagccgatacagatttaacccatgacttcaccttcttacgttccagcatttccttgaaatcgtaagccgagcattccgctatcaatgtattgttttgaatttgcatcgtttccttataattgttagggtacaactccccagtattatgtacaaaggtaaggataaaagtggagattctgttaaatttgtgccatacttttgatttttatgcgtttacatctctttgtttatgaataaaaatcgtacttttgcagtcaagagctgtggttgcttatggatgcttattttcggatttgcgatataattgcaacacgtgtacgcaagttgctcatacagagatgctgttgattttgaggaagtgaaatgattccgataaggaaacagataacaaacaataagcaaaagcgtgcagctcaatgagttgcacgctttttgcgtttagaagtttcttgcgatacttttctttaatttggtattatcgggaaagaagtaaattggctaatagaaccgctgtttctggttcatctttcggtgcttctttaggtttccatgctacaacgaatcgaacagaggcagattttacttcatatcctttttctttccattccgccaatgtattctgcatattttgtgataatttggctacaggtttattggttaatgaatcatacaagacgaaattgtcgtagtttaaaagatctccgcctcttaatgccaatatctctcgtttaagttttctgaagaatcccagatagacatctttatgagagagttgtagaacaatctcttcgggcattgcatactctttggagtcaataaaatactggtctacatttaaatgattaaaacaattgctattcgtatgtatagacagtctgttttttgcacgtgttattcccacgtagtatcggcgcatcaagtgagcatctttcaaataattgtcagatatgagcatatatacattgtcgaactctttgcctttggctttatgaatggtcgatatcacgacatctgtacctgaaacgttacagaaatcttctaccgatgattcaaatacaaactctttgaagtcactaaggtattttactttgttgatttgttcaaatagttccacacaacgctttacatacaccaaactttgacttccgttgtaagtggaaaaagtggtatgtttggcatcatcccataattcttccggaaccaggggtgtttttgcccgtttgtctatatacctcaggaaatatcttatttcggccatattccaaaaacggaaaccatccatagattgtactaacttgctgtttattccatattttcgtaagagagctactaatattacagcttcttcgtttgtttgggtgagtacacacgaagtgccattcgcctgatgttgaattaattcttcaacgagtggctgatacatatattttgattgatagtatgttactccaacccaaccattctcttttctcatagaggtgattggggtgcttttcattcttttaccgatacttttcacaaattcgttggcgaaattcactagatggtgcgcactgcgataattctcagtcatttcgaaaaacttgcttccgggttcctttgtcagtcggtgcatatattcggaattagatccgcgaaattcatagatattttggtcatcgtcgcctactgctatcatacgcatctcctcgttattggtcattagggcctttacaagcttatattcgtcagtactcatgtcttgagcttcgtctatgaccaacaccgtcttaccaattttgttaggttccacttctccctgattaatcatttcggtagcttctgcgacgacgtttttggtatcttcaagatttcctactcttcctaaaaggtcaaagcaataagagtgaaatgtctttatctcaacaaagtgggcggcgttgcctatcagctccatgagtctttgtttgaattcggttgcggctgcccttgaaaacgttaacatcagaagttgttcatgttttacatcttcgagcagtaagagtgatgcgagtttgtgaactagcacacgtgtttttccactgccgggacctgctgcgacaatgatgcaacgtgaatctttatcggaaatgatctccatttggcgcttggataattgaccgaataattgcttgtatttctgtggtgtcaggttacgctgtatttcactgaccctttcccccttgaagtattttgtgataaacttcttgtagtccatttggaaatagtcttgaacatattgtaaagccgaattgtaatctcttaccatcagattggcatattcacccacaatatgaacttgttgaatcttctgcttgtagaattcattaagcatttggtagtcatcctgcttgtatctcgatttattgtccttaattctttgaatattcatagcattataaaggaccaggaaacctccttcgagtttcagcgcaccaatttttgacagataaagaagtgcttcctccacgtcttccaattgtatgttgtcaagcccgctgaaaagggactgtggatttgactttatttgatttagaagttctactacagaaaactgaacagctttgttttgtgagatttgcttttctgtatcagcggtcaacttatatagccattccactgtgaaacggctgatttccaatcgcctttcaaaacgtttgatggttgattccatatctgtttgacggctgatttccatattatgaaccgcatcctctttcttacggatatatcccttgactgtgaggaaatagagtaacgttcggatgtctttttctttagatgtattgataccgtcgtttgttgcatcgtcattcagttgcttgcatgatgtccgtaaagatttgtcaggaatatgattgaggatgtattgttcaagtttcgcaaaacgttcgaggagcgtgcgcgattttcgttccgattcaccggtatctaacaaataggcggatatgtctttactgtctgccaatataccttcttgtcgcattctctccacaacagatatgatttcactcttgcttatccccagtatatctgccagataatcaattcgtgattcagcttctgaatcttgggctttggcaatatgtttctgtgaaatcagtgatttgatgattctgacggctttctctatctcgtcactgccaaatagtagtgacgctgatatgcgttttcttgcctcgtctatatttttaactgtgatacctgtagcatatacatgaggtacattattgcctcttaccaagtatccactttgttccaaagttgctaaagctgtccgtacgcgggtctcaatatcggatacagaatcatcccaacctgcctgtcgggcaatttccagtgcagagcagctaactttcatgcgttgtctggtgagatcttttacagctttccatacctgttgaatttcactaatacttagttttgtttggttcaacagtataaaatgcttgtctaagtcattatcactataaagcacatagcaacgtgcgttgaggctgggatcacggccagccctacctgcttcctgcacataattctccaatgaatcggaaatgtcgtaatgtaccacaagtccgacatccttcttgtcgacccccataccgaaagctgatgttgccacgatgatgcgtacttggtcattcataaatgcatcttgattggcaatcttctcttcagaatccattttgccattgaatggcaatgctttataaccgtcacgagtcaatttggcagccaattcttgtgtacgtttggtacgtgatacataaacgattgtaggacaatcggattctgctacaagtcctctcagttttaaatatttgtcatcgttattttcggcatgtatgacagaataacgcagattggtccttgaagccgttgatgcaaataattctaaatctaaattcaaggtttgtttgaaatagtcacaaatgtcttgtaccactttctgttttgccgtagcggtgaagcaggaaacgggtattggctttttacatcttttgttttgttggtattctcggataaatttgcctatgtagagataatcaaccctgaaatcttgtccccatgaagaaaaacaatgtgcttcgtctattacgaatctcacaacatggcgtgccattaaaatcttttcaatggtttttgaacgaagcatttcgggagatatatacaaaagtgaagcttctccgtcttgcactctttgtattgatagtgctcttgtaataggatctaacaatccgttgatagttaccgcatcagtaattcctctatcagcaagattatccacctgatctttcatcaatgattgtagtggcgaaatgacaattgtgagtccgtgcacagaacgtccttccataagtgcgggcaattgaaaagtaagcgattttcctccaccggtaggaaatattgccaatagtgatttgccttttactgctgcttgggcagcttgctcttgaagcggttcgccttcgtatgtacggaattgttcatatccaaagaatgttttcaagttatgaagcacattcagttgcgtattacagtaaacgcaattttcgctgcaactgttatgacgcaggagttttacgacaaattctacttcgggataattgtgcagtacccatccgggagtgatggagcggtagtcggtggtgtcaattaaagccaaagcgtatgccaattcacatggacgccgttcagttaacatctcaatatcagcatgctggcagatcttattcacgtaaagttttcttatgagatcgggtactccttcattgatatatttcgcacctaccatactaagaaatccttcaaactctgtcttgccttttagtaacgatgcaaataacgtacgttttttgtccggcagcgaattccaacgtgctatttcgtccagtagcagagcttttgctttttcgcaatcattcacagggttgttcatctgctcgctgatcagtttgtcatcttttacaagcttatgataagggcgttccggaaataataaaggtgatacataaagtgtatcgacaaagaagcagtggaatgttttatcggtaaacagatactttgcatcatgatggatgatattatgtccgcagatatagtctgtatcaccaagaaatttgaacagctcttctttcgaagatttatgaaatgttgcaccatcatgacggagtgccccaatatcatggattttatgatctttcaaaccaatttcaacatctactatggcataacgtatgacatcaaatggcacagatgtatttttattgttgattacatggttggtgtcctcatcttttccgattcctataagtctgctccatattgacatatatccaataaataagttgttttataattgaatttattatatatctgtatctttttattgtttgggtatagccccaatattgtttacaaagataaaaataaaactgaataatcggttaaaatcactgcattctttttatatatcgataccatttgttttgccgttcaatgagattactgtaactttgcgtccggtttaaaaagattgtatattatggagttacctaaagatccgatgatgctgtttagcgttatcaatatgaaattgcgggattgctattcttcgcttgatgaactttgtgaagatatggatgtagataaggaagagctggtaggtcaattaaaagccgcaggttttgaatatagtgcagaacacaataaattctggtaacagtcttttcttttatttacagactaacaatctatccggatatccgaaacgtcttcatgctcttggtagagcttatggagacgtttttttatcatattattattctctttcatatccttcactcgttaataaaagcaaaaagcaggattctgtatttaacttccacacttttatgcgttctaatagacaaagttcagaaaaagaatcgatgataaatgagaataaaatcagagaaacttgtgcctcgaatcgcggacggggattcaagatgttgatggacgtttttcaggaaccgatatacaattatattcgtagactggttgtatcccatgaagatgcagaggacgtacttcaagaagtgtttatccgcgtgttccggcacttagaccagttccgtagtgaaagttctttgagtacgtggatttatcagatcgcgacaaatgaaagtctgcgtttgctgaatgaccgtaaagaagaaagaaacgttgcctccgaagagattcaaggggaattaataaacaagttgcaagcttctgattacattgattacgagaatgagttggctgtgaaatttcaggaggctattttgagtttaccggagaaacaacgtcttgtgttcaacttgcgttattacgatgaactcgaatacgaagaaatagcacgaatcttggatagtaaagtggaaacacttaaagtaaactaccattatgctaaagagaaaataaaggaatacatattaaacagatagaagaatgaaaaaggattttgattttgacgatattggaaaacgtaccccttaccgtactcctgatggctttttcgaagatatgcaacggagagtgatggagcgtgcgggagtaaagcaacggcggaagtcacatttgaaactgattgtttctgcagttgttacgatggcggcaatattagccggattcttattcgttccgtccttgcgtcagataaatgacgttaagtcgccttcttcgatattggctgtcgatagaagtaatggcacggacgcggtagataagtggattaaagaattgtcggatgaggagttggaagagctcgtcagcttctctgaaaacgatatatttttaaattaagtaactcaatcaattatttaaaacgtaaagatcatgaagatgaaatttatttatgtacttttgggtgctctcctgttggggagtcagatgagcctttctgctcaaaacaatgataacagagaaaagaaacagcgtcctacgcaggaacaaatggtgcagatgcagaccaatcagatggttaaaacgttgatgttggatgatgcaacagcagctaagtttactcctgtctacgagaaatatctgaacgaattgcgtgaatgtcgcatgatgaaccgtaagcccagagcggaaaaagcacaaggtgcggaagcaaatgctaaaagagaaggtcaacggccgtctatgactgatgcggagatagcagcgatgttgaagaatcaatttgctcagagtcgcaaaatgttggatattcgtgaaaagtattataacgagttcagcaagatactttctcagaagcagattatgaagatctatcaacaggagaaaagcaatgcgaataaattcaaaaaagaatttgaccgtagaaaaaaaggacgtaaaccgggacaaggacaccatgagggacagaagcctcgtgctccgcgtcaaggtgaaaaataaagattaggttcattattagagttttattttactaaatcggcacaaaattgaacataggcagccatatttgtttttttcagcggcgtttgattagttgttatgtcttcttgctgattatcagtttggctgcttatgcgcagtccggtggaaagcgtttctccggacgtgtcgttgattcggaaacctatcagccggtaccgtttgctacggtccggcttttggctttatcggatagctccctgttggtaggaggggcaaccgatgcggaaggtagattccgattgaccgttgccgctcccaaaaataagtctttgttgcttcatgtctcttttatcggatacactgcggtttatcgggaagtatcgcctgtagcgggcggtcataaaaataatctgggcgatatacctttagctccggaagtaattgctttggatgaaaccgttgtggtaggacaagcgcctatggcggtaaccgaagaagatacaaccgtctttaatgcgtctgcttttcgtactcccgaaggttcgatgttggaagatttagtgaagcaacttcccggtggagagatagatgcggacggaaaattgttgattcatggaaaagaagtgaagaagattctggtagatggaaaagagttcttttccgacgatccgaaggcggcattaaagaacctcccggtggaaatggtggaaaagctgaaagcgtatgaacgtaagtctgatttggcacgtcttacggggattgatgacggagaggaagaaatgattctcgatctgtctgtgaaaaagaatatgaaactcggctggatggagaattttatgggtggatatggaagcaaagaccgttatgaactggccaatacattgaaccgttttcgagacaactcccaattgactattatcggaaacctgaataatacgaataatcagggattctctgagatgcaaaaagaatcagcagtctccagcggtaacctgcgtacacaaaaaggactgactacttcccgttctttaggtattaacgctacatacgattggcaacgcgttaaatttcgttcgaatattcagtatgtaggtacggacaggctggaagatagccgtacgacagtcgataactttctccgtcaagataagtcgataacgcaaagtacggggcgcaaccgcctgaaaaataacaatctgatcgcaaatgcgtttttggaatggaagatggattctgttacaaccttaatctttcggccccaataccgtactgccgcgaatgacagacgtaacggtagtttccagcaagggtgggggaatgatgttttgcttaatgagaaagagtcatccggaaccaatcataattcttcgtacaatgtaacgatgatgatgcaactcagccgtaaactgagtcggatggggagaaatatagccttgaaagtggattatggaagtaatgcctcttcaacggacagaaagaatctttctaccacgcattattttaagaacaatacggaaaaagttcagaatcaaaagatagaagacgaaatagacggctataattatcgggtgcaactggtctatgtagagccgttaccttggttgcattttcttcagttccgttacagttatcagtatcgggcgaataattccgatcatttcgtttacaattgggataaggatctggacgaatttactcccgattatgatgaagaggcaagcaactgtttcgaaaatcagtatagcaatcacttgtttaatgttgcggttcgcacttcccgaaagaaatataactataatataggtgccgactttgaacctcagaagtctgtgagccattccgtattgaaagatgatccggaaaatcaattggaaagatctgtttttaatttctctcctaccgtcaatttccgttataagttctccaagcgcacccgtttgcaaatagtatatcggggaaagagtcgccaacccaatatacgtgatctgcagcctgtgacagatcgtaccaatcctttgaacatccgggtgggtaatccttctttgaaaccttcttatataaatacatttacgttgaatttcaattcctacaatatgaaacgtcaacggaatatggttgccaccgctttggttgaaaacacgattaatagcgtaaccaatcaagtgacgtatgatagcgaaacgggggtacggactacgactccactcaatctgaacgggaattggcgggctttgggctctttctccctcaacactccttttagaaaccgaagctggatattccgcacctactcgtatctgcaataccggaatcagaacgggtataccactatcaataaagaagctcccgtgaaaagtactgtgaaacatcttactgcccgtcaacgtctgcaattaacgtatcggacaaagcagatggagatcagcacacgtgccgagttgctttataataattcgcataacaatgtgaaagagacgcgtacggaaacgtatgattatcgtttcgggacggaagtacaatattatctcccttggggaatggaattgtataccgatcttacctatttccaacgttccggctatggctacgaaggttatgctcgggagaatctgatgtggaattgtcagttgtcgaaagccttcttgaagcggaaacaattgttgctccgtttcaagatatatgatatgctccgtcaggatgtttcaatgatacgtaccattaccgctaccgctatccgtgatacggattacaatgcgttggattcttattttatggtacacgctattctacgcttgaatctgatgggacgctgaatggaaattaaatcttcatttgtctgaaaccactaccctgttttggttgttgtatgtcatgcgtataaaacggtgaagagtggtagtatgtttagattgatggaaaaaataaaagatgacggccgttggcgaattttcaaactgaaattgattgatgctcggctttacttcgtcagtatctttgttggattgctgacggggcttattgctgtcccttatcattatttgcttcaatatttcttcaatctacgttacgactttttcaactctcaccccaaatggtattggtatatccccctttttctattgatgtggggcattctggtatttgtttcctggctggtcaagaaaatgcctttgataacagggggaggtattccgcagacacgaggtgtcattaacgggagggtggaatataaacatcctctgattgaattggtctctaaatttgtgggtggaatacttgcattgagtacgggactttctttagggcgtgaaggaccttccgtccagatcggctcctatgtaggctgtttggtttccaaatggggcagagtgcttgccggtgagcggaaacaattgctgtctgcgggggcgggtgccgggttggcggctgctttcgctgcgccgttggcttcatcgctgttggttattgagtccatagagcggtttgacgccccgaaaaccgccattacaactcttttggcgggggtagtagccggtggggttgccagttggatttttccgattaatccttatttccagatagatgcgatagtgccgggcatgacgttttggtcgcaagtgaaactgttccttttgctggctgctgttatttctgttttcggaaaactgttctctataactactcttcaggtgaaacgtatttatcctgccattaagcacccggaatacgtgaaaatgctgtatctgcttttcattgctttcatgatttctatgactgaagtcaatctgactgggggaggggaacagttcttgctttcgcaggctatgcatccggatatgcatattctctggattgtaggtatgatgttattacacttggtctttagtattttttccttttcttcgggattgccgggaggaagtttcattcctacattagtgacaggcggactgcttgggcaaattatagccttgattatggttcaacagggagtcattgcctatgagaatattagttatatcatgttgatttgtatgtctgcttttctggtggcagtcgtccgtactcctttgactgctatcgtcttgataacggagataacaggacatctggaagtattctatccatcgattgttgtaggaggattaacttattatttcacggaaatgctccagataaaaccccttaatgtgactttatatgaagatatgattcattcgcccgcatttaaggaggaaacacgctatactttgtctgttgaggtgatgagcggttcttatttagacgggcaaattgtagatgaacttcgtctgccggaacgttgcattatcattaatgtccatcgggataagaaagattttgcgcctaagggacaaacgttaatgccgggtgaccaggttcagatagaaatggattcacaagatatcgagaaactatatgaacctttggtcagcatggcaaatatttattgaccggattattcaatgcttctgagccatgaaatttcttctgcccatttgctttcatctggagtttcgagtatgagtgggatattatcgaatctgggatctttcatcagtctttcaaagaaagcctttcctatcaggccttcgcctatactgtcgtggcggtctacgtggctgcccaatgctttcttggaatcattcaggtgcattccacggagataaccgaaacctacttccttgtcaaattcatcaaagaccttatcgtactcgttgacaagatcgtaaccggccgtataagtatggcaggtgtccagacaaatacctacccggcttttgtcgtccacccggtcaatgatatattttagttgccagaattcgcttcccaagttactgccttgtccggctgtattttcgataacggccgtcacgccttttgtcttttctaatgccagattgatactttctgcgataagggataaacattcttcgattgatatcttattgagagaacttccaggatgaaaattcaataacttcaggccaagctgttcgcagcgttgcatctcgtccagaaaagcggcacggcttttggcaagtccttcttcttccggatgtcccaaattgatgagatagctgtcgtgaggcaagatgtattccagttggaaaccatatttattacaattctctttgaagagagcgatactttcttccgtcaatggtttgcttacccattggcgttgattcttggtgaacaaagcaaacgcgtttgctcctatttcatgcgcattgacaggggcaagctctaccccgccggatgcacttacatgtgctcctatttttttcattgttatatctataattgtatgagatgattatgttggctatgattgcaaaggtaatgaatatatttaatataggaatatatttaataaagtttgaaactgctcccgttgtgcgtagctttgaatgctttttattgtagtaaaacttgtgttctcttatatcctaactttcttatgattatatctaaacttccgttttgcggcaatgaaactataaacgaagattgcgtttataaaaacaaaggcttcatttatataaatgcaaccttcgtttttataatcaaaggcttcgtttatagattgcgactagtcaaaccgagatttagttactgatgaagagaagtttggctatagggaagaagaagttgtctattagtaaaacatggctgagtatgcgccctattcatacggacgctattcggatgagatgtaagtaagcgtctctgcgattctatgtaagcgtttccgagattctatgataggtgaaagactgatgaggggaagacccttcacccgcaaacgacgatgaacaggacgttatggcgaaaaggtgaagggctttgaaattttaaatccctacatgttagttcgttggttttcgtgaattgtattgggttgtcatcgtggagaatacagagagtgtcctcgaacaccctcctgtatcttttaattagttctttttatatttcaaagtccggcaaataatccgtcagtactttactgatctgtttgccttttatctgatctgttacaattgttgcaccttcctttttacctgcatcatagttcaaagaaaccttttcagatttgttggtaacagtgatagcggcttttcctttctcggccagattgcagttgataacccaatctccgacttgaacggtattaccgttacggactactttcatatccgggcgattatttccatgagtatccataaccgttaagaaacgggcaaccttgcatggaacggttgtagaagagaaatgccagtgattaggatatttcagagctttcccttgcgcgttcgttacatttttccagtttgtcggagcacagaagaaagtatctgcaatagcctgttctgtcttagccgaactgaaaaggtgagctacagatactccgcctgccttattcttgcccgtaacttgcacttcgttcggaagttctttcatttccataggaagttctaccgtatgcaaaagataactccatgttacagcctctttaccctccagttcgtcataaatcacatatacgccactattgcctaattggatgatatgacggcggaacatatccagtttgttctcatcccatcctttttccggagtatattgagtacccgatagctcaccgcgtttcagccaaatgggagcagtgacttttccgtacgcattggacgcatcacccaccatataggaaatcttttccccttcataccaacgtggaatccagccgtatccttccgtacctatcttctgcgtcataccattgaccagaatactattgtgcgcacgtgtattgcggtaggcgtacatgcaatgatcatccgtaaaaccggtacgatgaccgctactgtagaaaatagccttcccaccatagaacgtgttgaaagcattctgattagccagtgcatgagaagtggaaccgtaaggactcgaacggaatgaaagcatggcattcttacctatatctcccaatgaagtatgcatcgttgctattcccgtttcgttgaatacttttgtcatagggagctcagccaatgaacgttcctctttcggcaatgattttttagtagtacagcggtaccaagtcaagtcgccggatttacctaagaatgttttcttcatgatgtccggttctttttccaatatcgtgcgtgcataagctgccgcccacggattattacattcacgtgccagtgcatctgcgtagcccacacgcgtgccgttcggcttcatctttgtctcatgagaattcccctgtccggcagatttggaaaatggcggttgctgatagatgacataaagtgcattgttgttataccacgggtcggcaaagaaatcgaatccactgatacgagagtagaaagcaggcacttcgattaacgtgcggagattgacatggaaataagaatcgccattatgccatcccccgtccgtattaagtcccggcagacgagatacccattcattgtaacaataatccacccaggtggaagccatcggaagttcgccgtacgttgcgaaagccgccatattcagaatacggaaagtcatttgccagacatgattgtcggcaatacggttttccagatgattgacatactcatgatagaacttcttgccattatcgcggatcgttctcaagagcagttttttttcttccggtttcatcaggttataccatgcatcgtatgccgaagtactcatcgacagaatcgtggaacggttgaaatctcctgcaaaatacttgctgtttttccatgagagaatttcagaaaggcgtttgataccttccttataatacacctcatctttagtcagcagataagcgcgtaccattgcttcaatgttcgcttcttcacggtctacaatctttcggctttcccgaatcagtgcagaacggtattgcacgatgttcgtcagtttcacaacctgtgtcgtatcaatttcctcttccaaatgtttcagcgggtgattcaaacatttattggcctttgtgatatacgcctgtgcttccgggttgttcttattccgttcgatgatgttatcccagtcgttcgcatcgagcagaatgcggggatgagtctttggaaatttagccaatacttcttgtagtgaaggcgggttgaaagtacgcgtctgctcgtctacatagaaatggtaaacaggcgaccattcctccttaccgtctttgtcaacgtatgcgtgctgccaataccattttcctttcccgaacaatttgaaaggattgaagaatgcccatttcctttcagcggtgataacttccgacttgaactccggatcacgtgcgatgcggatacgataagttacttccggtttgaaatcctcttcttccacaccgtcgagtacggcgccgagatgcggatacttatccggccacatgaagcgtggcggattaactgcaatatgctgtccatccagtggcgaaggagtttcgcgtacctcatgcatcaatgtctgttggctgaggcgcataatacctttctgggcatatccgtttgcggataacaggatggaaaacaaaaggagaatatagcttcgttgtttcataatcatgcttttttaaacagttttttcagtttcactgtcttattgttaatcaacgggcgagcccaaaagccgatgaacgtgatgtatcctacaaagaccaggataaacaacatacctgttctcagcgacgtagcatcggctatcgtgctgacaatcatcggaccgcctgctccgcctacgattgcggaacataaaataccggcaaaggagccatgatgttgtgaggcggaattcaaggccagagagaacacgatggagtacatcattgaaatgctgaatcctacggcagggaaagcaatcaaagcaattcctttgcttccgaataaagcggaaagcaacaacacaatcgtcaatactcccgaaatctgtaacaatcgtttgctgtcaatcaacttcagcagcaacattccgaccagacaaccggccgtcatcaatccccaaaaataactaacggcttgcgcgccatctgtttgagggttgactccatgatactgttcgaggaatgtactcataaagatagaagtgccctgctctgtgctgacataacagaagattcccagaaagaacagccatacatacttttgtttgaataaagccagataggaatcctttgatccgcttttctcgtcttctttcaattcaattttcgggaaacgggagagactgacggcaatcaacatgaccaacagaattaaggcgaatacccaataaagcgatacccaaggcatttcccgcggggtgacgtctgccaataaatcaatgaagaatccttttccggctgtgtacgttgccggatcaagttcgcgaatcagataagtatacactaaaggactcaggaaagaagcgattccaaacataaattgcgccagttcggcaacgaacgcatagttctcttcacctcccacagtacgttgaagcggattcagtaccgtttgcagcatagccatccccaagccgatgatgaaggaagaagccagcaacatcggataggtatgcatacaagcaaacagaatcgttccgataaacggcattaggaatccgccgaacaataccggcttttcaccgaaacggtcgatcagtaacccggcgggaatggacatgatggcataagccagaaagaaagaggtcgggataaaacccgccattgccaggtcacttaaattgaagttgtgaatgatgtccggaataagtggtcccagaatattagtgataaacgagattgtgaaccaaaacgccattatcagcgccagcattcctatatttcttttcataattttgaataagttgaaagttgacaattggaagtcgagagtttattcaacttttaactttccattaaagaagagggaagcggccccgatacttcctgccttattgcctaatgcggcagccatgatttccgtattcacagcacagtcggagatagcataacggtgtgctttttcacttaccttccggatataaaaatcaccggcttcggaaaggcctccgccgatcacaatcttctgagggctgaacgtattgatgaatccggcaataccgtgtcccagaaaatcacaatgttcttccagtgattcggtggcaatcttatcgccttgtttgtaaagacgcacaatcaattcaccgttgatctctttgcccgggtaggagataccggcttctgctattcgtttactgaaacgtcgtacgagagcggaagtagaagcatagtgctccagacagccgacagaaccacaagcgcagggctctccattggctattaagggtacgtgccctaattccgttccccgattggcaaaaccgttgaataatttaccgttgataacaactgcaccgccgataccggttcctaccgttaagaaaacaacatgagtcgctcctttgcctgccccgtacatagtttcacctagtcccatcaggttagcgtcattccccaataaaaccggaatgccggtttctgcttcaatgcggtctgccaaacataggttttcccatcccttgatgttctccgcacctcccagaacgatctggttcgtacaatctacgatacccggtgttccgattcctataccgttaatcctacaatcctgttcttttgcaaaagccttcacttcattaatggcggcaaccaactgtccgatgaccgcttctgccgatacatcggctttcgacggcaacttcccttgaaaatgaaatacgccttcattatcaataagggcgtatttcactgaagttccgccaaggtcaattcctatagcgtattctttttccatatcattttaatacttgatttacactctttctgcccagatcggtgaactccacgcccattgtccgtcgcgttgacgggcgcgtacatagtaataatccgtatcacgttgaggctctttatcctccatgtaatgttctaccgtgaagcaactttccggcatagcgcggttgaagaggatcgcttcgctcaaccagccgatcataaagtgtgaacgtgaaccttcaagcagttcacctaatgtatgttcaaacttcttgccattgaattctgcgataatcttaccgtctttcggcatttccacatcaagtattacagcctgcatagccgctgtggtagtattcggattcttgctgctgtacatatccagttcggtttccttgtcgttcacggaaacgatgcggttgacgtgtgtgtggaattctgtttcaccttcttgcggagacgtgaaggccgcaccacggaagcaaggagttacaccgtgcaattttcctttatccaaagacagtttaccctgccagtgtacatattgttcttcgcggttccaaccgaaatccatcttcactttgcaacgtaccgtgtcaccttccggagcaaccggagtcaacggaccgttcatgcgggccagaatctgaccgttctttataatatctacatagtcgatacagctttcaccggttacattcacatagatgcgtcggctgtttccgcgaactacatctcccataaaggcgtcattcaaccggaaatcgatcagaatcttatcacctgttgcggcgcatacgtggcgggtacggagtgcgtcccagattgcatcacgggttaacgatggagcaagcactccgatgcgtccgtctccgtaacttccaggataaccggaatgctggtcggtagaagccatgataccgaacttattgcctaactcaagaccgtattgaatggttccttcccattggcgaggtcccatatcatgcagatacggataatctccctgatcactttccgccagaccgtgacgggaatacatctctacgaacggagtctgatctccttcggtgaaacatttccagttgtagccacgataaccaccttgataacccatgtggtgcggagtgataaatactttatgtcctttggctttttgtttccagtcctcaatagaagtacattcaacaagcggtgcatccaggtcatagttcaatgccacatggtcaccatgttccatgctgtgagcttcatagccgataaaagcgaggaattcaccttctttattgtattcgtttgtcatggctacatatttctcgtaaccaccttcacgcaaacgtttgaaagcacctgtatgataatcgattacccatttcagacgaggatcgtccgctccgggaatatccggccacatggcatggggagtgacgctgacaaaatccaattgtccttttgctgcttcaaaagcgtcgcgcatatcgccgtgtccgtatgtgatgttacagtggttatgtaagtctccccaatacattttgaggtcgcttgccgatggcatgattttctttgcatctttgctgtccggtgcacaagcacccaataagctgcccgaagctgccaatccgaggaaagaccagcctgtgttttttaagaactttcttctatccatggttttagtaattagtttatctgtttttcattagtcggcgatcccctttgaaaagaactttctctttctcatcaggatcggtgtctttgtactgtttttgagtctcctcaagaagttgcatcagttccttttgtttttctgcatattccggtttgccgaaaacattattcatttctctggggtcggctttcatgtcgtacatttcccattcatcaatgtcgttgtagaaatgaatcagtttgaaatcttgggtacggataccgtaatggcgttttacagagtgctcggcaggatattcataataatgataataagctgcttttcgccagtcggcaggagttttgccttcgttcaccaatatcggtttcagcgaggcaccttgaatatccgatggtatttccactccggcaaagtcgaggaaagtaggggcaaagtcaacattcatgctgatcgcattgcttacgcttcctgctttgattgccttcggataacggatgataagcggcatacgctggcattcttcatacatgaagcgtttgtcgaaccagccatgttcaccgaggaagaaaccttgatcggaggtatagacaataattgtattgtccagctcaccaatattttcgagataattcatcaggcgaccgatgttttcgtctactgccaatgtggtagccagataatctcgcatatactgttggtatttccaactgatcaactctttgcctttcaagtcgcccttacgatattctgcgatacgttgtgcatacacagaatcccatttgtcctgtacttctgcaggcatacgtttgtacacactgtaaagacggttggtagtatctttcagcatttcttcacgagtcagcagtttgagatcccagtcgtcagtcaaagtgtgttcgatagacatatcctgttcacgagccgctcttccacgtccttcgtagtcgtcgaacaagttggcaggttcgggaaaggtagtattgttgaagatacccagatagcggggagcaggcatccagttgcggtgcggtgctttctgatgatacatcatgcagaacggtttgctcttgtcgcggccttcgaggaatttgatggctttatctgtgataatgtctgttgcatatcctttttcaacgatatgtttaccgtcttcccagaagtcaggatcgtaatagtcgccttgttcatgctgaccgctaaggatgctccaatggtcgaaaccttgcggctcactgataaggtgccacttgccgatcatggcagtctgatatccggcttgttgaagaagctttggaaatgtctgctggtcaccgttgaaagtgctggcattatcggtaaagccgttctcgtgactgaacttaccggtcaggatacaagcacgtgaaggaccggagagagcgttgacagcataacaattatcgaaacggataccttcgttggcaatccggtccatgttaggagtctggatcagatttcctccatagcatgacattgcctgagtggtatggtcatccgtcatcatgaaaatgatgttcggctgtttggcttcttccttcttttgaccaccgcatgaagcaaggcttaatgcagccaacgggaggaatagggtagagggggttttcatcaattactatattttgtattttagtgactgtttctttccgtttactttcacttctacttccagaccattttcatcgaacgctttgttcttgaatttagcgtcaaatttaggggcatctgcgcttttctttaccggatagattacagtgatataacgtacagcttcttcgccgtctttcttcacgttgaatgatacattcatacgtttgtaacgtttgcggtaagctgtagaacaccatcccggttcttttttcatagtcatgccgataggaccgaaacattgcagtttcatgttgctcccatcctcgaactgagtaaggaatgtcatgtcttcgcgactgtttgcgatttctcccttcggcatttgataatgaaggttgatggaacctttggcgctgcctgccaattcgtctacaattacaaagtatgtgttgtcgacgaagaaaacggaacgacggtgcttcaagtttttgtagcttgggttttcagtcaccaacgtctggattgttccttccggctgccataacttagttacagattctgttatatccagatttttgttgttcagagtcacagtgttgtgaacacaagtctgacggtgccaattgcgttgttccattacttcaccttcgcctgcatacacatacgaacctgaatccgggaacagatttttgccattgaaccatagttcgaatgtaccgttgtccggttggcagtgccagaaagctttcggaccggcttttaccaccatttgagtagcgtccgttccccaagagttgcggaatacgaagaaacctgatttcaagaatcctttagacatataatccggcaatgcaccttctttaccttctgttgcgaagtatttgatagcctggtttttcgggaataatttgctccatgatttgtagttcttcaccacttccttctttgttgtcagttttgcgtcactgaaacacggatttgtgtagtcgggaaaggagatgtttgcatagaacataatcatgctttcgatagtatccaaatagtcttgtgggaattctttgcggaatccgtttgcgtctgcgatacccagtgctttacagaagatattgattgcggcaagatgataatgcgggtcaagctcgaattgtcccccatcttcatatacctgtacatgaatttcacggttcaggatatcaatgccgctctttctccatgccggagcgtccttgaattcagggaagaaagcaccggcataaatcatacgctgagcttcaaacaacaagtggttaccttgatctgagtaattacccaaaatatgtacagcgtgtttgtgatagttcaccaagaactcagttaggaaatctggagtgaaggaaggagaggggaggaacagctggaattgtgaggtttgatcttgcagacggttgctcacttccaacggacgccatgcaaaacgtacgttttccacttcacctttaagtttgctgtcactcaacatttcatattcttttttatccatcttcaccaacggattcttttttatccagtcgatgtactgatgagcccattctttggcatatttctcatcaccggatacacggtaagccttacccatcggagtgaaccatttgtgacggtgcaactgccaacggagttcgttatctttcaccggccaatattgccagttgatgtcttctccataattataagaaggttgataacctttgtgtacaaagaaagtatgttgcagcgcgtcgtctgcccatttctgttcttctttaccgatagtgattttgttcagattgatatccggagtttttacgtttgtacgtgcgcgatagtaatcaagcaaagctttggctgcatccgcatttttaccttcctgatgaagtgctttcactttttccagtcccggatagtccagattgagaagtgaaaatacttcgcttttcaactcttgggcataacctttgcctacgagacatgcaaatgtcagtaggacgatatattttaaagttttattcatgatatactttacgattttaaaatttactattggactcttactcttatattattgaatcactctcaactctccattctcaattctcaacttcttcaactccatgaatctcttcaatgcttccagatagtagtagtcggcatagttcagtggagtgtctatttcagaaccgttaggcaatgagccgacagagtgcaataggataaatccttgattgtcgccaacttttgcaaggtatgcatcgcttgacaaactcttcagaatcttttctgcgtaatccagatatttctgtccgtcgggaaccatagtgctcaactcgattaatgcagaagcagtaacagcggcggcggatgcatcacgcggagtctcttctgtcacaggagcgtcatagtcccaataaggaatagcgtcgtcagtcttcacacgatccattatcatgtcggctactttcactgcaaagttcaagaaagtagtgtcgtttgtttcacggtagcaagctgtgtaaccatatacagcccatgcctggccgcgtgcccatgaagaatcatcgttcttgccttgatgagtctgtttgcgttctactgttccgtcgttgttgtagctcactacatgccagcaagtataatccgggcggaagtggttgttcatagtagtcatagcgtgtttaacggcaatatctttatatttgttgtcacctgttgcttttgctacgttaaacagaaggtcgaggttcatcatgttgtcgatgataaccgggaaattccatgttccgaaatcccatgaacggatagcggcgatagaatcgttgaaacgtccgcaaagattatcggcagtttctttcattacggctgcgatagtatcgttaggagccaaacgttcagcattgccataactgcaattgatcatgaagcctaaatcgtgtgtgcctttgtaatagcgtacaggattcaaaagatttgtatattgaatggcttgtgctttcagagtatcgtttcctgtcagttcgtatgcgtaccataaagaaccaggaaagaaaccgcttgtccagtcataaacgccacagagacggcgtttacctaattgctctgcagtcggttgtgcgcgaagtgagtctttgaaagtcagtgagtctctttctaattgacggcaaagaaacgccatgtcatagcctgtacggatagaacgcggcagcattcctgtgccattaatttcctctgcggaaagctgtaattgtgcagaagctacatctagtcctttttttatccaactgtagtcttccttaggggctgtttggcacgatgcaagcgcaattgtaaccgaagcaaagagaacgagtttctttttcatgttattcattttaagtgattgtttttagaagttttgtaactgatgcaaaagtaggtgaaagctctaatttcgcgttacaagattgtcgaaaagacattcaattaaggcttttcaaatttagattttgttgaaaaaggttttaatattctccaatatgccctataatcaggcatattggagagaattgggatcagttccatttaggattttgtacaaactgttcacataagtccatatcacgttgtgggataggataaagttcatgtttgccaaacactgtatatcttcctgcggtattatatgctttgtttttggccatattatcatcaaagaaccactctgtgatagcattggatgtttctttaacagttttatagtagatgtcccaacgtactaagtccatacggcggtgtccttcgaatgcaagttcataagcacgttcgtcttgaatagctttgcggaagtcttcgtaagataagttctttaaattatatttgttgtttccataggcacgttcacgtactttgtttatagcatcgtatgcctctttagtcgggccttgcttccattcgttgagagcttctgcatatagcagtaatacatcagcataacgtaagaaataccagttgacatttgatttgtcattattgattaatttattctttacgtatttttcaatgtcccatttggcgggggtgtagttttgtttttctttgttctttaatttactatctgcatcattttccaatgcttttttatcagtatcacttttacctttagcatataaaactttgtttggactatattggtaatttgctactgaaaggttcaggcgtttgtctttaacggtttcgggattgtatacctcaccgtctgtcaagtccttttctctccatttcagaacgaaaggatgaataaccttaacattacctgcgcaacttccacgttctcctgcaagcattgtcgtttttactccattccattttccaatgcgtccgcacgggtcactggcgcctccggatgctgtcggactgtagaaactgatttcaattaaactttcagtaggatcccaaacaccattacaagtattttcccataattgtttaaagtcatttaacaaatcatgtttttgtgattcgaccagcaccttcgcagttttggctgcctctgcccatttagtgtgatctttaaccggatatccggcccatgtggcatagactttggttaataggcctaaagcagctcccttggacatacggtatttattgttttggcgatttgtatcgtctattgcataaggaagtgtttgtatagcatgtaacaagtcttcttcaataaatttataaatagtttcaggtttttcctgaacgaaagtacttggagcttgttcggacattgctgtattagtcattaatggcacattaccaaatctgcgtactaactcgaaatagcacataccacgaatagctcttgcctcggctatgtaaatataagccaattgcttgtcggtttcattgaaatcgttcatccgttgttgaagaatctccatgaaatcattcgcattataaatagctttatataaagcagcccatgtttgttgtatttctgcttggcttgcattaaaagcattggaaggaatgatacggtaattttcagtagtacttccttctacttgttcacaatctgttgccagattgaacagaattgagaggtgatagccatacatggcatcactcactaaactttgataaacgcctaacaatacagtttccgcttctaaggcgtttttcatgaatctatttttatcaatctctgtccgagattcttcgtcaagcgagcatgagaaaggaagtatgcacatcgctgacaataatatataataaaatatctttttcattgcgttctttattagaattgaagatcaataccgaatgtaaatactctactcttaggataagcaccccagtctaaacctggtgtcataggattacttcctgccgtactaacttccggatcatatccactgtatccattgatgcagaatagattttgtccactggcgtaaacacgtaatttagatacataaaatttcttagtccatttatgcggtaacgtgtatccgagagtaacattcttcaaacgtaagaaggaaccatcttctacaaaacgagaatatacatcatttgttatataacctttaaccgaaggtactttattagatgcatttgtttcactccaacgatcggctacttctgccatcatgtttctacggccatttctagtttgtgtggcatacaaacgtgtagcattatagatgtcattcccataattgaactggaacatgaaacttaaatctattcctctatagttgaatgtatttgtaataccaccataccatttaggaagtgcgttacctattaccgtacggtcttctgaagtaataatgccatcaccattctgatctttatattttacaacgccaggacgtaaaccatctgcatcagtatagcgagtattatttactactccttcctttaaaatatatttaggattgttcgcgtctgtatatccatctatgtaaaagtcagaactttggtagataccatcaaattcatacccgtaaatcaagcctaatgatgaacccaccatagctatgtagtcatcttgggtgaagttaccgtcgaaaccggaacgggttgttttataattagcaccggactctaatgatttcagttcattacgaataaatgaaatattgaaattggtactccatgtgaatgatttcgtctgaatgttagtactgctaagatttaactctataccgcgattctgtattttaccaatattttggtattgggtactatgtccggtaacatgtgctaattcttgagctaacaacaagtcttttgtgtttttgatgaagaaatcagcagtgaagtttaaacggctgtcaaagaagcctaaatctactcctaaattgacactggacgagccttcccatttcaaattttgatttttaatttgtttaggggtaagtacagttactaaactgttaccgataccatatctattattttgatataaatcaagtgagagataattagagattcggtcgttaccaacgataccccatcccaaacgaaccttaaaattagacaaccatgaaatatctttcataaaggcttcttctgagacacgccacgctgccgagaatgaagggaagaatccccatttgtttttctttgagaatacagtagaaccatcggcacgtaccgtggccgtcaataagtaacgattgtcatagttgtaattaccacgtgcaaagaaagacaacaactttttgtcaccaaagtctgtgacgactttacttggggtagctcccaaccctaaattgttgttacctaaatagtcaacaggaaagtccattgcctgccctaacaaatattcattgctacgataagatatttcatgtcctaacatgatatcatagctgttctttttgttgattttttgtttccaagttaactggttagaattggtccaacgtaaatcacgtcccatttgggtgtctccgtaaggcttttgaccattacggaatgcttcttttgaaccctctttatagaatttgtcaatgcgattgtttgtggtattataagttgctgctgttctgaaagtcaatcctttaataatttcccaagtcagagagacattggcagaccacatttccgctctttttttattggttacagactctgtctgttttacaggatttacttgtgccaaactgcttccatcttccaacattacaggatcgattgcagatgccagcaattcttcatctgttaatttaagcccacctgtaggacgtgcgcttaaaatttgtgccagcatattaaagcgtccgctatccgcagttgttccaattccttttctatttgtttgcgcataatttatagttgcatcaaatgatatttttttggtaagcttttgctttaagcggaatttggctgttgtcctgtcaaatccactgttattgaaaataccattttcgttataacgtgtgaataaaagagaatatgtggtcttttcgtctccacctgtgattgaaaggttgtgatcttgtgaccaagtgggattaaatgtttcatcctgccagtctactccactttgaccaatataatcctctaatgattgataacggtatggaatgccattgtcatcatttccttctttataatatgtatccggatatttttcgttaatttctccttgcaattttacaaactcataagggctgagaagatctaattttttagtgatcttacgataactggcggaaccgttgtatgtaactgttggccgtccgctttttccggatttggtagtaatcataacaacaccattggcagcacgggcaccataaattgctgaagaagaggcgtcttttaaaaattccatagactcaatgtccgagttggcaatgttatcaatgttgtctacttcaaatccgtcaacaatgaacaggggggaagcatctcccgtcatagtaccgacaccacgaatgttgatgttgaaacctgatccggggccaccatcggattgagtaatttgtacaccggcaatttgacctcctaaagctccaatgacagaactgctttgaaaacctacaacgtcttttgcggctaccgaagcaactgaaccggtcaagtcgctgcgtttcatagaaccgtaacctactactactacctcgtctaatgcttgattgtcaggtatcatttttatgtttactttttgctgtccggtatatttcacttcctgtgttttatatccgatataggaaaccacaatggtgcttccttttttggcattgatagaataattgccatcaatatcagtaattgttcctccgctatttccttttattaaaacagttgctccaattaatggaagatctgtttcgtcaacaactgttcctttaactaaattctgggcatacagactgattgacatgaccagtgccaagagggtgatgaatcctctatggctaattgttttggttattatattgtgcataattattagattattagttttattcttcgtaattttcatcaaaccagatgattagtggtgttactttacctccaccgttgacatttcctattataccatcagtacaaaaagtcatttctgctgctataaatccattagcatatccctcgctatctttccacatatctttaatgatattcactgaatgttcatggtttttgtattctatagtattcggattgtaattaattacataacctaaggattgagagctgttatctttgtatccactgtttgtgaagaatgccatcggtggtttgtttgcattatttttttgtccacaagtctcccataaatgagccatgaatggtgaaattttatctggatttttttggtcataaggtacaccattagtatgattacctccaaaattgtagtagttgaagtttctacggtagtctaataagaatttcttacgcacatcacctgaaagttcactgtcagattttcctttaaggattattttaggagatgttgatattcctcctttatgtggattaacgtgtaatacaaagggataatattcgattttgacattatcttgattgtattttgtccaattgttgaaatggaagaaaacagggaccttaagttctgtcttatcatttacagttgcagtaataattccgatattggatgttgctgcatctcctttccaaccagagaatgtaatttcattattggtgatatttgcagttactgatgtagaaagtttttcgtatttaaatgtaatcttagcagtggaataagcattggtttttatagtgaaggttctattcatatcatcttcactattgaatctaaattgattttcgtattgaattcccggtaatgcattaccgttcgtatctaaattattaccacaatgaatgtatgtaatcctatcttcattttgagttagtttgaaagttatattggcttctttttcatattttgaattagcaactttgactttcattgtataagagtctttaccttcatcatttatcactagtttatttccctctttcatagtgatagcacctgttgttgcattaaattcaatgtttttttgtaactctggttcacattcaataagtgtatatttaatattttcacctccacctactatagttggctctatggtatatgaaggactaagctccattctttcaattgtatttgtttcattttcgtaataaaattgatcgaattttgcaataaatgctactatttttaaagaataggcgttttcaataactgttcctacctctccttcttcattgtacatatttcttgcacaaacactgatcttataggttgttcctttttgtaatccgtgcccagcttctacatatagtttacctgtattttcattaattttaattatttcttgttcgatggcaggttcaattgcgtaaatactatattttaatccatctgtagctccttgatacgttggaagtaccgattcgaaagttgttccttctggtgtagctgtactttcttcttctaactctccttcagcggggtcataggaaaaattaagtggcttagatgttactttaatgttaatactatttttttcatccaataaatattcatctgtacgggttgataataaaatactaaccgcatataaggtgcctggctctaagattcctgatttttcatcttgtacaatagtaaattctccttcttgggagatactgaaacattctttaacaccttctgttgtcactaattcgtaaataggttcttcttctgtattctcattggtgattttgaatacatcagaaacagtgtatgaactgatggaaatatgttcttcaccagttgttgttatttttgctatgggcatatcaatttcactatttttgttaatgatatccccgtaatcagcctgtattagcttgggagtgactattacgtttttaggagcggatgctaataatttaacaattacaatatctttatattcatatcgagtccctccggatatgcaagagatggaaattttgtagcgtcctttagctgcattttctgtgttttgcacagaaattacccctgtttcagaatcaatctgaaaacaatttcctgtatacacttcattgttaagtgtgataccggtaattgtaaaatcagaaggggcactacctttatatgtaggtttactgattgttccggtcatagatggagctatgttggtcaatcctgtataataaagtgcgaagttggacgagtctgttgtttctgtatcagaacaagaaacatagaacagcggtgaaactgtaactattagaatcgccaaaaaactaaatgttaattttcttagactcattttatatcagtattagttatattattataggttgattatttagtgtatcctaattcatatctctgaccatttactgtgacctcgagctttattgcatcctcaataaatgtttcatcatcagtgaatctggccgagatttcaggtgtttcgtttgcgacgggatatattacggttatatatcgtaccggactattctcttttttatccattacgagtgagtaagccttacggggaaggaataaacctttggtgtcgtaggaaatatatcctttgacttcattttgggtgatatctgcattaccaaaactacgtatgaataagttgttattgtcactaaatgtagtatgtgctccgtggttttctatatctaaagaaacagattctgctgttttatcgtcacagagatggaaatatagtttactaaatccggttgcgtttcctataccttcatctactattacaaaaaatggtttttctttaggcgtgacaaagaatatagaacgtctatgagtaaagttggcatatccttgattctctgtggctacaaattgatactggttagtttctcctttacggattaatttacctaaggtgttttttatatcttcatctccatatctttttgcattaggttcatcattgtcttctgtttctttatcgcttagaatcattgtgttatgagattttgtttgacggaaccaactgcgaatattattaggagttccactacctgcataagaagatactccggaatcagggaaaaagttacgcccattatgatataattcaaatgttccgttatccggttgattgtgactccatatatccatcttttcatttgaatagttattactatgtattagcatagtggaagttttatcccatccatttcgtagaatatagtgtccggagttctcgaaaacttttattcctgcgcttggtgcatgtccttgtccaccacgagttgccatccacgctaattcttgattattggggaacatctcagcatatttcttgaagtttttctctaatacatttttcgttttcatccacgaatcattgaaagctgatgtacaatattcgttgctacctgcctcaaaatagttgggataggtaaaatgtataactatttcggtcgctttctctaggatttggtcaaacttggaagtgagtaaattttccggtaaatgattctcttggatgagccttttgagattatagagttcgtctaatatacctatgtgataatgtaaggaaaggtcactaagcattccgtccggtaagaattgtttttcaagttgttcattaatgattctacaaccttctgcttgccattgaggagcatctttgaattccggaaatagagttccggcaaataccattgagattatttggctaaatagaatattattttcgtctggatagcgattttttagcaagaaatcggcatgttctgcaaagtgaactaaaaagaaagaaagccattggggggtgaaattggatgaaaacttgaaatattcaaatgcttgtgcttgccccattagacgtgtagatacttgtaattgccaccatgcaaattcatctacaactgtttctgttttagggaattttgatacccaatctgaatacacgtctttccatcccaacatatatatttcatcttgtgtcttttgatatgccatggcttggaatggaatccaattgtgccgatgtaactgcttacggtattcgtcgtcagcacctttgggaataaactcccaattgatctcttttcccgattttaggctgtacggaactttttctttgccatttccaagatctttttcttctaagtaattggcatttatataaaaacgataaccgttttctgctaatgctaattctgcgtatcttgcttgttgtgttgtaatagaatttaaggatacataaggattaatgataccaattcgacctctatagtattcgagcagagctttggatgcagagtaataatttcctgtttcataccatgcttttacctgttccaatcccggataatctaaattgataactttaaacaaacgttggtcgatttcctcgttaggaaaacttgtttcctcttcggcagaatcttttccactgtttttgtagagttcgtcgtcatctgtgcatcctgtaaatgcaatcagtgagaacacgcaaataaagaagatgttcttcatactttattaggttttaattattaaaagttatattttactgtttgcaaatgtaatctctttatatataacgattggccgaagttgttcaggctttgttcaaaaatgtttttttgatattagttttgttgaatcatatactatttatgttcaaaagaactgtttatgacttgaaaataggtcttttgtatgtcataatgtaacctcctcgtacatatatagaggaaggcttttgtacatttttaggtgttggtttggacgttttttagtccaaagtgatttttggaaacaggtggaataggggagattatgaagtccggaatctgtccttggggatagataaaaacttcttctcctttctttaaatcgatttggtatgtgccgttgttggtagtttgtacagtaaacgcccgtttccctttgaatatgggattaacaatgtcggtagttacgatacatggttctcctgcaagacttttgatgtggataaacagtgttttcccattctttctgttagcagaaactttgaatgctccttctgtgcgtaaaccggagaagcagacatctttccaaacgtccggcagtgcagggaaaatacggagtttccctccccaactttgtattaacatatcatgtatacattgtgcgcctgatagtggcgtctcgataaccgggccgctttctttatacatggtggtcgaactaaggaacttgccaaataatttgtttagataggatagagcctcgtttccttttccaatagcggaagatatagaagatgcacctgtacatgagtaacctaaaagagctttcggcttactttgccaaaaggctaatgatttctctataagtcgggtattgtttggttgctccttattaataaggtataaaggatagatggaaagcaagtgtgaataatgcctgtgggagaaagcataaggtgtgtcttttccaataagtaacccgttttcatccatcggatacggagtgagattatccaaaacatctttccaggttgaaattagtggatcttgaatctgcaatcgctgtgctgactccaataaggtctgacaaccccaatataatagtgcgaggttaaagttgcagtcttccgttacaccatattcgggagaataagtttcaggtagatgatatttgccgtcttctcctttttggataaaatgaagatagtaattgatggccccttttaataacgggaacaatttgttacgcaaaacttcatcatccattttatgacgataaataagccaaagattatggcaggcccaaggaagaagtcccacttgcgcttttcctttaccgggaattcctacagtggtcgtcatgcattccagatttgaggcaacacctatgcccaatgagttgtgacgatatgcggcaggtatgttcaagcgtagttggtcaatgtgattatagagtgcattctctagagatgcggctaaatccaaatggtcggaagcattcagtgcccagtaggtgagttgcacgttgaggttccaccaagcatttggccacggtgtttcagataaccacggaccggtgttatctattaatgcccggtcgccacgagtagctgaggctagtttatacatttgaatccagtagaaattttctttctttgcatccggtaagctgatgaaactagcgggataataagagttccaccattgccgatgagcattttgaagtgctgcataacctttacgtatggcttggcgtatttctgctttacaaatcttttttgaagtactttgtggataagtgtgtgtaagatttatccataagattctttcttgtggagacgtttttgtctcttgccatcctacggttgtttctcctcctgccaataattcttgtatagataagtttatctcattttctttgctgttagtaggggaaggattgagtttgtaaccttcggggatcttattcgtttttcctttgcttttgaataatagataacgcgggctgttagcttcagcagctatccattcccatcgaaagtcatgttcatctccttcggtagttgctttaactacgatgatcatatcatcagcatgaacgaaagtttgtagatggataattcctttcgtagtggtgatttcagttgaagcctctgcgttccaaagatcaagacgcatcttgccgctgattatttctcctttagggtgtaaagcaaaatgcccggtaagtagtcggggaattccgaatacatctctttttgcacgatgatcgtgtacatcacagtttcctgtttccaggcgtatatagtttttattcggttctttgtagatcattagtcccaatctgccgttacctagataggctgagtcataccaatattccggtaatctttcccatatcatatcctgctgactcataaattgaggccaatttatattctgcttgatatccatagaataaatatccgcactacgaaggcagattaaaagcagaaggatacagttatagtatctgtgttgaatattcatagtgccatttttgtgttttataaggttaacgagagatttacaggttgctaacaaacataggaataaaaataataaattccaactaattgcttgaatatatttttgcataacttttagtgtttgagttgaaagcttagtggatatacctgattaccgatagtcacttcaatagaaacatggtttgagtttgacgggtcatcagtaaattttgcactgatcttttgattggaaaccttactgaccggatatagtatggtaatgtatcgcacggggatacttctttgtttcttcataacaagtgaataggcttttcttgttgagtattttctgtcggtctgataagatatccgtccatcaaaaggctttagggtgatggcctgatttccaaagcttcggattaataagttattgttttcaaaggtagtatgtgcgcctgcctcttgactgtccagaatgacattatttacagatgtttcatcgcaaagatggaaatataacttagcataaccggttgctgtgccaaatccttcatctaccaatacgaaaaattcggtcggttgttttacataaaaaacagcacggcggtgtttgaaatcattgtatccttgattttcggtaactatgagttgttggtcggcattttcttcttttagtagtaacttgccttctgccttgctgatattttcggcaccgatatcttcgtgatcttcagattttcccagtaccattgtattgtgcgctttggtctgccgaaaccatctgcgtagtttcattacttctgcatcatcctctttcatatatgaacatactccggagtccggaaagaaattacgaccgttatgatataactcgaatgttccgttatcaagttggttatggcttgagtcttgtaacttggaagatatgttattgctaagtatcagcattgtagactctggtgtccaaccgttgcgcaatacataaaatccggaatcttcgaatgttttgattctgctgtcgggaagagtgccttcattaccatacgtttgcatatactttaattcagaatcttccggaaacattgccgcatacttcacaaagtttttgtttaatacactgcgtgtttttatccatgaatcattgaatgcgggactgcactgtttgcttcctttcttaaaataacttgggtatgtgaagtgcatgacaattttggtggctttcaaaagcgtttcatcgagctgtggtgagagcagattgtccggcaatttattcagttggataagccgtttgagatcataaagtccgtctactatgcctatatgataatgaagagagagatcgttagtcattccatcttccaaaaataactttgtagtttgatcatttataatctcacatcctattttctgccattgtggggcattcttaagttccggaaacaatgttccggcaaataccaatgctactgcctggcttagtagaatattgttttctccggaatatttgtacatggatagataatcggcatgttcagcaaaatgtatgaggaaaaaggaaagccattccggagtgaaatgagaggaggatttgaaatactcgaaagattctgtttgccccataatacgtgtggacatttggagctggtgccattggaatttgtccggtttcccattcggctttggatttttgagtatccaatctgtatatacttctttccatgaaagcatatatttttcattcttggatttttgataggctttgccctgcatcggtatccaattatggcgatgtaactgcttttgatattcattatcagcaccttcgggagcaaattgccaattaatcgtttggtcgttacttttcagtgaatatggaattttccggtctttgtcttccaagtaattgtcattgacgtaaaaacgatattcgtctatggcataatcggcataaccttgctccgtgtcattaagagtagcagtcagattagggttttcaatggccgttctgcttctgtagtaggtaagtaacttttgcattgctgcatcattctcaccgcttttatataaagattttatttcttctaatcccggataatcaagattgagaatatcaaataaatgttcttcgtcctcttcctgaggaggggttggctcgtcttttggaggaagattattattattttcctgaatgtcgttgtcagtgcacgctataaacgtggcgataagaaataacaatatgtggatacctaatttattactgaagctcatagtattaattattagtttacgcaatttctgagtactgatttatttctctgcaaatatatggagtaaagtagcctgattatggataattttattgaatagtatttcaattttgtgcaatgttcctgtttgatacgtggaaaaggccgttgcattttgtaaaattgtgctgtagtattaataatctcgtctacttgtattatgcaaaacatcttggtcttttgataagttcgtctgatagagttaatgagttggagttgagtaatcgactagttgctgttgtgtaaccatatggaaagacaagtgtaacttatcggttacacaactgtaatgcactaatgaaaaaatgcacttttctcttggaaaaaagcgaaaacatcctgttgttttttgtaaacttattctattttacccctgtttttggacttaaacctttgataatgaggattgcaacatttttgtatttccccctataatacttagaataactacaaaaatgtcacaggcgatgaaagagaggttcatattgctgttttacaataaaaaatcttctatattctccggagtaatttattataagagacttcagagtctatttgaaaagccagtgcttgaaggagttttacaatcttgtctgcctttttgatgtgtccccaatctaaactttatataggtagctgtctgatagtaacttcagaatttcactttccgaaccgggatgtgtaactatattcccattttcttccggtaagaggctcatttactttattggctaagtcgaacgaggaactcatgaatggtttgttgtaatgctctttctatcatattgcttcctccatttatctgagaacaaatttcgagcatttttggattcggacttatccttttgttctcttaatgtattctgtcggaaggtatccaaaatatttcttgaaacttgtagcaaagtaagacggggtattgaatcctaccattgtactgacttccgctacggtataacgtccgtctttcaatagtttggcagcttcgttgaaacgaatcttacgtataaagtcgatcgtggattcgccggtaatcgctttcagtttcaagtgcaggttggagcggctcatgttcatttctctggcaaactcatcggtggagaactcgatattgtccatattcttttctacaatacttacggcacgtttaagcaaagcctcgtccatggcattaaacgtgatcttttcgggttctacttccaaagacttggaataacgttcaagcatacgtctgcgtgtacgcatcatattttgtatcttcgtggtcaggatcgaaagagagaaaggtttggggatgtagtcgtccgcacccatttgcagaccttccatctggtcttttgtttcgcttttggctgataacataattaccggaatgtgacaggtcggaatgttctgtttcacatttttgcataacttgataccatccataacaggcatcatcacatcagtcacgataatatctacctcatttcctttcaatttctccaatgcttcttcgccatttcctgcctctaatatattgaacagttcggcaagcccgctacttagatagtgccggatttcattgttgtcttctacgatgagaatggttcctcgctttttgtcaccggattctatagcttcattctccaccttttccgtgtcgatgaaatacatttctttggaattggtggaatatacctgttcctcctcgctcttattgccgttagcagccagttcggagggcttgtagatacttatatcctgtggcagatagacggagaacgtacttccttttccttcttcgctatccagttcgatatgtccgtgatgtagttcgaccagacgttgtatcaatgaaagtccgataccacttcctacatgttcactttcgatctggtagaaacgctcgaatatttttccctgtttattgataggaataccgataccggtatcactgacttgcaacactagataattattttcttccttcaacgtgacagtaatgctttgtccgctttctgtatatttgaaagcattcgaaagcaggttgtttactatcaattccagataattaggatcaaaaagtacctctttatcttccagatcggagtggagagtataagttatctttttgtggcgtgccagtttatcataaaacaaaaaattttcttgtatcagttggtaagcgttcgctttcttggcttttaattcgaatactccgagttcggcacggcgataatccatcaactgattgacaaggtgtagcagacgattagcgtttcgttggatatattccaattggtttcgtgtccaacgatcgcttatcttattgatgatatcctgcagaggagccaggataagagtcaatggggtacgaagttcatgggagatattgatgaagaaacgcattttcatctggttgatttcctcctgatgttctttgtctctgcgttctatttccagttcagcttccatgcttttgcgcatccagaagaaacggaaaacgaaagtgatgaagccgataaaagtggctagaaaaagaagaatagcccaccatgttttataccatatcggaagtacgataatctcgagtacagttgggatagtgttccatttaccgtcactattggcggcttttaccatgaaatgataagtcccttgtggcagattagagtaggaaacactacgtttgtctgtcagataataccattctttatcgtatccttccagcttgtaagcgaaagtattatgttgtcctgaaatataattggatacgacgaactcaatggtgaaagctgtttgccaggatttcagtgtgatactttcagtttcactgatgtttttagtcaatatgcctgtttcatcgtccggacggaccgttttattaaatagctgtagcttggttattactaccggcggagtgtatggattgtccagcaacaattccggacggaaagtagtgataccattgataccaccaaagtacatttgcccgttggaagtgcggcagtaggaggaagagttgaattgattactttgtaatccatccgattctgtaaagttacggaacttttccgtttccggattgaaacaggaaataccacgattggtactcagccaaagtcgtccgaaagtatcttccagtatgccgtagaccacattattgggcagtccattaattgttgtgtatcgtttgattgttttttcttcctcattaaagcaatagactccttcacgtgtgcctatccaaataataccattggaagcctcgtaaatgcaattggtaaataactttgtaactgatgattcaggtagtatcgtaactttctgtatttccggtccttcctgttgaaagactgatataccctcttcaccgccaatccaaagtcgtttgtgggaatccctgaataagattgtgattcgttgagaagtgaaaggcgtgccgtctttctctttttctatggttgtaaaactgcgttctttcggattgaaacggactaaagcgctgagtgttcccaataagagattaccgtctttgtcgggaaggatggcatatacattctcattgataagctggctgttcagctgattaaaactttccatccgtccactgttacggtggaggacgttcaatcctccggcgtgtgtacctatatataccaatgatttttcttcatccacatatacagctttgatattgttggaaccgataccgatttcacgctcgttttcttgcaaggcgtaatgggtgaaatgttgtgtcttggtgttgtatagattcaatccgccgtcattggttcctatccacagattcttgtccttgtcttctacaatacagcttactacattgtcactcaatgagttcttatatgggatgcgctgtatattcttgaatcggtttcggatgggatggtaatagttgagaccgccaaagtaggtgccaagccacattcctccctgtgaatccataaaaatacttcggacggaacgttgcgaaaggctgccgctttctaccggactgctgctatatgaaacgaacgagtcactggcttcgtgataaatattcaaatcattgaaagttcctatccatagacggttttgtgaatccaatgccagagaacgtatgtaattggaacttatacttttcggatcggaggaggaatggaggtatgtctttagttctttagttttcggattgagcaataataagcctgccccttcggtagctatccatattcgggtgggagattgctgtaaaatagcctgaatccgcttggtatccagtataggagtcactttctccagatttttttgagtgacggaataactgtaaagtccgtcttccatcgtaccgatatagattatgtcaccatgccggtaaagagcggaagctatgattttgtgcatggcagtactgaaagcatcttctacaaacttggattctttgctgtcgaacatgatcagaccttcctgtgtgcttatcaacaattgctcaggagagatttctgcgatgccgttgacctgttgccgtttgccttttttttcatagaaaaagttcttgaattggtctttttcttcatcataataagatagaccgtctcgtgttcctatccaaacccgtccctgactatcggtcttgacaattcttgaaatgtcattggcaatgctgttaggatcatcttcattgtgttgataaaccgtgaatgcgtatccatcatatttgtttaccccatcataagtggcaaaccacatattgccccgtttgtcctgatcgatggcgaatacagtgctttgtgacaatccttcattgatggagatgtaagagaagttgataggttccggtatttccgaaaaagcggaatgggtacctaaacacagaaatagcaagcaaatgactatatttttaaggttgctcattattaggtcataagattaataatggcttcaaaggtagtaaaatcttttatatacggtataatgaaagatagaaaaaataaacccggaaatgattccaggcttatttgtatgatttaaaaatcttattatttttctaaatttccgatttcgtccagattcttttgaatatcttcatccgtcaatgaatagttgaccaaatcacctgccagatacttgtcgtatgaagccatatcgatcaggccgtgtccggaaaggttgaacaggataactttttcttcccctgtttccttacattggttagcttcacgaatagcagctgcaatggcgtggcaggattcgggagccggaatgataccttctgcttgtgcgaacaggcaaccggcttcgaatgattccaactgttggatatctaccgcttccatcaatttgtctttgagcaattgtgaaacaatcacacctgcgccatgataacgaagaccaccggcatggatatgtgccggagcaaaattatgtcctaatgtaaacatcggaaggagcggagtatatccggcttcgtcaccgaagtcatattggaatttaccgcgtgtcagtttagggcatgaagcgggttcggctgccacgaaacgggttttctttccttccagtatgttatgacgcatgaacgggaaagagataccaccaaagttggaacctcctccgaaacacccgatcacgatatccgggtattcacctgccatctccatttgtttttcggcttccagaccgatgattgtctggtgaagggtgacgtggctaagtaccgacccaagcgtgtatttacagttgggagtcatttgtgccagttcgatagcttcggaaatagctgttcctaatgaaccttgatagttggggtgggcagtcagaatatctttaccggcacgggtagacatggatggagaaggagtaacctgtgctccgaacgtctgcatgatgctacggcggtagggcttttgctcataactgatctttacttgataaacggccgcttccaaaccgaagacttttgccgcgtaagaaagagctgctccccattgtccggcacctgtttcggtagtgatattggttacgccttcctgcttgcaatagtatgcttgtgccaatgcggaattcaatttgtgagaaccgatgggacttacactttcgtttttgaaatagatatgagccggagtaccgagtactttttccaatccgtatgcacggactaacggtgtgctgcggtaatatttgtacatttcgcgtacttcctccggtatttcaatccaagcatcggtctgattcaattcctgtcggcataactcttccgcaaagataggatagagatcttctgcttttagtggttgtttagttttcgggtgcaacggtggcattggcttgtttaccatatcagcctgaatgttgtaccagtaatgtggaatttcttcttccggtaggatataccgttttcttttgtcactcataatattgtggtttttaattatctgctgccaaaagtaggcaaaatttttaatattcagataaatttgtcaacaaagaatcggtttcgattgttattttaattaagtttgcacgacgttataaaaaatatgatatgaagatttatcataaattcctgttatatcagaataaactgctaaaaccttatatacgaattatactgggcttagtggaggctttaacttatttagcgtctcttacgctaattgtcggagtgatttatgaacacggctttccgttgtcggtagatgaaattgcgaaaatacaagttctgtataaggctgtatggattatctttctgattgatgtaacgttgcatatttcgcttgaatataggagcactaaaaagcaatatcggaaattggcctggatattgagcgggctgttgtacctgactttgatacctgtcatttttcatcgtccggaggaggaaggagctatcttgcagttctgggagttcttggatggcaaattttaccatttgatattattgctggtcttttctttattgaatctgtccaacggattggtacgtctgttggggcggcgtaccaacccgtctttgatattggcagtcagttttctggctatcattcttattggcacgggattattgatgttgccaaagtgtacggtgaatggcattacttgggtcgattcgctgtttacggctacgagtgcggtgtgtgtgacggggctagtaccggtggatgtgtcgactacatttacgacaggagggctcgttgttataatcttgctgattcaaatcggtggtttgggagtgatgacattaacgagtttctttgcgatgttctttatgggaaatacctctctttataatcagttggttgtccgggatatggtcagttccaattcattgggttctttgttgtctaccttattatatatattgggctttacattggtgattgaaggaatcggtatggtctctatctggttcagtattcatggtacgttggggatgaatctggatgaggaactggcttttgctgcttttcattccatttcggctttctgtaatgccgggttctctacgctttccggcaatttggggaatccgatggtgatgaccaatcataactggttgtttgtctccgtttcctttttgattattctgggtgggattggtttccctattttggttaacttcaaggatatcgttctatatcatctgcgtcatttctggaggtttatccgtacccgtaagttggaaaggcacaaggtgcatcatctttataatttaaatacgaagattgtgctgataatgacttttctgcttttggtaatcggtacattggcgattgccgctttcgaatggaatgcttcgtttgcggggatgcctgttgcggataaatggacgcaggcattctttaatgccacttgtccgcgaaccgccggtttcagcagtgtcgatttggcctctctgagtgtacagacgttgttggtttatctggtgttgatgtggattggaggtggggcgcagtctactgccggtggtgtcaaagtgaatgcctttgcggtagttgttctcaatctcgtagctgtgttgcgtggtacggagcgtgtcgaggtgtttggtagggagttgtctcatgattctatccggcgttccaatgcaacagtggttatgtcattgagcgtgctatttctttttatttttatcttgagtatgctcgaaccgcaagcatcgttgatggcattgacgttcgaatgtgtttcggcgcttagcacggtaggctccagcttgaatctgactccgagtttgtgtgatgcaagcaaattattggtagcgttattgatgtttatcggtcgcgtgggcttgataacattaatgcttggaattgtgaaacagaaaaagaatacaaaataccgttatccgagtgataacatcatcataaactaaagatatgaagtatattattattggtttagggaattatggtcatgtgttggcagaagagttgtctgcattgggacatgaaattattggtgcggatatcagcgaaagccgtgtggacgcaatcaaagataaggtggctactgcttttgtaattgacgcgacggacgaacaatctttgtcggtacttccgctgaatagtgtggatgtggtgattgtggcgattggcgaaaacttcggtgcgtctgtgcgggtagtggccctgctgaagcagaagaaagtagcccgtatttatgcccgtgcaattgacggtgtgcataaggcggtattggaggctttcaacttggagaagattctgactccggaagaagatgctgcacgtaacttggtgcaattacttgacttcgggacaaatatggagggtttccgtattgactcggaatattatgtagtgaagtttaccgtaccgaagaagtttgtgggatattttgtgaatgaactgaatttggatggagagtttcatttaaaacttatcgggctgaaacgtgcggataaaataaccaattgtttggggatctccctgacagagcttcatgtgaaaaacaatttgccggaggatgagaaagtaaatgagggggacgaattggtttgttacggtaaataccgtgatttccaggctttctggaaagctatctgataattgctttatgtgaatatcggctattggagttccggtttgcaatgattaataaccacaggatgaagttggacattgcattctgtggttgtaaagtttagttgtacaattaaactttgcgtagtttccggtttgtgctggtcgaatacgaaattccccaaactgtaaaagattggtttgccatcgtaatattcctctttttgaatgatgtgaggatggtgtccgatgattgcatccgctccggcgcgaatgagcgagtgcgcaccttttctttggacaagggtagggaggggctgatattctactccccaatgaagaataacgactatgtaacttttgggattctgccgtttgaagtttgtgatttcttctttcagttcctctatcggctgctgacagataccgggactgttttccagatatacccagttttccaaaggaagtgcaacggagttgtaaagtgccacttctatctttcctttcttaataagaacaggctggcaactttgtggggaagcatctccgtagcctaccggagtaattccggaggataagagatattgattggtgtctgtcaatccgtttcgtccttgatctattgtatgattatttgccatagcagcgtgagtaataccggcttgggatagaactgttgcccatattggttcagcgcggaagatatatttcttgtgcagtggtgaacgaacggaggtaatagggcactctagattgataactgttgcatctacggagcggaacagtggtgtgactgattcaaataagtgttcgacacctttttttcggatttgttggcgtactcccctgtccaaaaggacgtctcctgtgaaagcgatagatagacattcttctgaaggctgttgacaggcagccagcattaggaatatgattccaatgccagctgtgattcggcttatctgataaaagttcattaacaaccggaactataaaaaactctttcatttacatgaggctccttctctatcaggatactcttcatccactctggtacggcgggtgctttcttttcttccagcattttttgccattcttcatcggtaagccttgtgcctagtggctggacaaactcgtaatagctgaaggtcgccccgcgagtcaaatagaggttgccttctatttctactacgacataaatattgttggcatttcctgtcgctatatgtagtattccattcttgttacaaccccttatattgcgggtataaatatcggctactatggctatcgacttgtccggaccttgtactaatgaccaatcatccagatgcaaatctgggtcaactacagataaagtgaaatactcaatactgctacccatatattccagtgtccggtattccggttctgtcagtttctctcctctcagttctttttctgttacttgaataaggaaggtgacgtagtcattcaattgatcggtttttcctttcaggtcatcggtcatacaatcgttctgttgcaggattagtcgggtggcctggagaatgttctccattttcctccagaaaggtagattaggttctacatatcctacaacgattggatcgggaggtccggcacctccacattcagcagccatcggctgttctccataaagtatggcatcgtgttttaactctgcccaagaagccaaagcagtattcagattcttgtatccccattcaggagtttgcatgaatcccggattatttttgtccgtttgttgcatggtgagcaaactcttcatccatagttcgtagacagagagttgtgtggatttacttgttttgaatttatcctttagttgttgtaattctttagaatattcgctccagttattaggctctttataaaaatcaatcaacaaactttcagcagtacctgtgccaaaggtcgcgaagacatccaaacctttcgggtaggctcgttgactattgggattgacatcaactaacttttgaattacttcattgtcagatagataccgttgtggcataaagtttattttatcccggcaagtgatttctatctgaggctttatgttgtttttatgttttgccaattcaataagagcctgattcactttctctatttgtccggctgtcagtgcgtcttcaatatgtatggcattattcttttccaaaattcgggcgatatcaaagatggataggttgtcagcttcccccattaggaatgtgagtggggtatagatatgttgatataactttatcagtggtgtctggtctatacttttgtaagtacaaagtacggcagcctgaaaaatggaacgtttcaattgttcctgttgctccctgcaaaagcaggcagtttgcagccacatcattgctttgaaatatgcttgtaattgcggttctcgcgtgtaatgtccacgaggcttgaaaaggctatacgggaaatatgcatctttgtatgaaagaaagtcagaaaagttatcttcctgtttattaatgtgctctatttcttcctgatattctgtttcatatttggagggaacggtaagcgtcttattggtcagcagataataagggatggcatagaaggttgctgcgtgttcggccatatcttttagggattcgtcctccgtttgttcggccagcttgatgcaggctgcattgaaagaatggcatagcatttcgagtgtaggaatgatatgttgcttttccagactctttaggatataagagaaatacatgtggaatgcttgcagatacaggtcggtagtaataaaattaggtacttggcggtagtcgttttcttcgtaggcatgaaagagttgcaggttatttccttttgtgatgacaaagttgttttgttgtagtttctccaatatttctttgtctatatccttaaattgaaacaagttgacgatgttatttgtatttcccaggtaataggaatcccgttgtatgaattgatgctggcgtagttctgtcatacgtgcatcaatacggtcgacaaaggctttttcttcaggtgtcaggttgacctcttcatagctttctgcaaacttaccttttccttcttctgcgtcccaatatatatcattgactaagttgttgtaccatttggtattggctgagaaaaaagcattgatatccgcttccataaaatgatagccatgtatggcatacggataactgcgtaataaccgtagttcctgaaaagaaagatggctgatatcctgctttaaatcaatgaactgaggtagtaccgtatcagtcaacagcgaggaaacgggattggtaattgtatctgtttgtgcagatacagcggacatgatttggttgtttttgtttttattcttgcatccgcagagaatgaacaatagtatacaggtgaataataatagtcgtttcatgtttatttccattcaattaattacgctatatagtatgatgatagtagctaatgtttgaggatatgtatggcttcctgttttttaacctcccgttttaagtatcgcttgaaatccagaccgaatcctctccagatgtattctgcgactagaaaattcccactgcgttcccgttctagagtccgtatccgtgtgggagtctcttcacggattattctgaagtcttccaatggttgtgctactcttgaccctaaccaaagcggacggatataagcttcatctgcaatccggtaaataaataaccgtttgtccggtttgggatcaaatcttgtcggtttgataactccgacaatgatttcgggaactccgtttcctgtaatatctccataatcaaattgatagacagggtagggcaatttccaggtagaatgactggggcgatccgtgtccaggtggataacataaagtgagtcggactctttattcagagacacttccatgtgtttctgagcaaccttccattcaaacctgttattgtcgtgacatgaacagaatataggcataagacctgttaagaggaggaaagaagtcctatatgacatatccgtaattttttctgatgcaaagataaatattaatttgcatttataagctccttttcttgcaaaaggaaaggccttgcctgtatttatatataaaagccaccggacgactttcgatagaagtgcaatccggtggcagattaagatattgtttgttcttgaaatgtgttatttcgtttggatacgaatatttccagctttcactccacttgcttttgctgtgagtacgatttctccggctgtttcaccggattgtactatggctgtcagcattccgttgaaggtatgcattttcggaagatggaattgctctagatttgtcgggtcgccattagcagcggcacgatacttgcctgctccttttacggagaagtttatctgtcggctgtcagcgggacatagatttccatccttatctaccactttgacggtgatataggctaagtcttttccgtctgctgtcagttcgttgcggttgctcaccagttcgatgtgatgaggctttccggcagtgcggacaattttttcagctactgcttttccatctttattgtaggctactacttttatctcgcccggctcatatacagcatctatccacattaggcggtaacggtttttaagcgagctgttgtttttactttgtttgccgtaacttttaccgttaataaacagttcggctgtaggatggttggtgtatacaaatacgggagtaaccttcccttcacgtcccggccatgtccagtgcggcaggatatgtaatgtttccgcctttttgttccatacactgcgataaagatagtaacggtctttagggatactggcaaggtcgatgatgccgaacattgaactgtgattaggccatgcgtttgtatcgtatggcgatggttcacctaggtaatcaaatcctgtccatacgaattgtccgattgtccaatggttgtcgtcagctagcgcaaagtcttcatccggaatatttgaccaggaacaggcttccacatcgtatgaagagcattggtggtcgtcgtaagtggcactttttttatcttccacagggaatttgtatactccgcgtgagctgacggtagaagcagtctcacttcctaatatcagattttgtgggagttggtcgtatgcctctttatagcgatgagcccgatagttaagtcccggaatgtcgatcatagcggcaaatccgttggcaagtacgcaagtcacttggtccattccgcaggtaacgggacgggtagggtcttcacgatggcaaatatcttgcaggaacttggctactttataaccgacaggactgcattgggtcggtacttcatttccgatactccacattactacacacggattgttacggtaattatgaagcatattcaccatatcacgttctgcccattcattgaaataacggtgataaccgtttttacatttggcgatatcccattcatcaaatggttcaatcatcatcataaatcccatttcgtcacataaggctacaagttcgggagtcggcatattgtgggaggtacggatggcgtcacatcccatatcttttaatagtgtaagctgatgccggagagcggctacattaatagcagcacccaacggacctaaatcatggtgattgcatactccttgaaacttacgatgctttccgttcaggtagaatcctttgtcggcaatatattcaatactacggataccgaaacgtgtagtgtaagtatctaccaacttattgtctgcgtaaatcttggaaacggctttatagagtgacggattctccggtgaccagagttcgggcgcatttacaataaaattctgttcgaatggctgtccatgattaatgcggcttgtattttctttgcgggtaacgacttttccatcaggagaaagaatctccgtttcgatacggagttgtgttttctcgcctgcattctcaattttcgtttgaaggcgtatggatgcaaagtccttgtcgacatgaggcgttgtgatttgtgttccccatacgggtacatgaattttgtctgttacaatcagatgtacattacggtataaaccagctcccggataccagcgtgaagattgtggacggttttccaaacgtacggcgagtgtattcttttttccatctttgttgaggaaaggggttacattgcagtggaaggagttgtatccgaaaggccagaaacaagcttcctttccgtttacatagacacgtgcttcgctcatagccccatcaaaaagaagtgttacttctttgtcggcaggagcgtcaaaacttgttcgataccagcctgtgcctacgtatggcagtccgccggtgcgtccggttttcaaggaagcttttttctcgaagttctgtgtgactgctacattttgtaggtcattgtttacatcaaacggaccgaagattgcccaatcatgtggaataacaaccgattcccattgggtatcattaaactccggctggctcgcttctttgaaatctcctttactgaatttccagtccttttcgagtagtgtctcactgcgttgtgcttgcaatgtgcaggcaacgcccatcaaaagtacagttaataactgtttgggatgtttcatgttcatttttgcttttcaggtatactattagttggatttattaaatgtcaatgtccggcattacattcacatagtaatgccggtgtaaaggtataaaaactaatcaataaatttatcgcttgaaggcattaaatgaattggtaggtcttccgtcgtcatcgaacatacctttgtgatatcccttccaaccgccatagcattgaggttcccaagcgaatactccgggacatatatcagtacctagtaatttagctttagtaatgaagtctgtataaaatgcttcggcgttttcattgttccatgtcatgcctatttcacacatcataacgggtgtgttgaattcttcatagagtttttgcatatttgcgatacaatctgtgttcattttacgccaatctgctgcaacaaaattggaatcttcttcattgtcaggatccatttgaggataaagagacattccgatgatatcccatttggcttgattagcttgtagatctccgaatactttctggaattgtccaatttcatttccacggtctatatgtacgatgactttagcctgcggataaacttcttttactgcattataacctgctgttacgaacttggcaaaatttacggttccattttctttatttatattgccttcatcgaacaacattccgtatcgagtttcgttgcccacttgtacccattctacatctatacctttttctttcagagtgttgagtacatctttggtatgcttggcgatatcctcctgcaattgttctaccgagtggtctttccatgcttgaggtttgtattgtttaccgggatctgcccaagcatcactgtaatggaaatctatcatgagacgataacctaaattatgagcccgccacgctttgagtacgacatcttctttgttacaccaaccgtatacgttatctttttctgtcggattttccgggttgacccaaacgcgcaagcggatagcattcatacctaagtcacgtagcaatgacatacattcttgttcttgacctttagcattgtagaatttatagccggaactttccatctctgtgagccaactgacgtctgctccccgaacaaagccggacatatcgtaaactgtttctgttttctccggaaaagtgggagtgtcgttatcatcgctgcaagcggtgaagaaggttccgcacaatagtgcggaagccgtaagtagtatatattttaatcgtttcatagtaataatatcttaatttatagattggatagtataagtgccgtttatcaagtctacactgatatcgtaagttccggtagttactggatatattcctttgttggcattgtaatatagtttgccatcgtatcctccgtaagatcctgcccagtcattatttattatgaattttacaccatattcggaatcttggtctaatgtaatagtccctgtgtataatccttctgtgtcagtagactgtaagggggcgaggtcatcgttgccggatatgcctaagtagcaatagatgcctgttacggctttgacactatatttcagctctttcaaagatacctcaaataaataaagaccgttatctggagctgttagattatttccttttccattgattaaatctccgctttcggcagtgcttgtgttgtcgtctgtggctaaggtgtacaatttactctcgtcccaataattaaccagacacattgcgtaatctccccattcagaagcgacatttacaactccagcatatttctgagcgtctttatcgtaaatggtaattttatggtcgtatgcccattctccattgacggctggacctatccccggtaaatataaatattctccttcttctggttcaggctcaggttcttcttctttttccgtcacactgaccgtccatgcttccggattattcaagtcaataactaacgtgcattcacctgtcatcggtacattcactgtgatgttttctgctgttacattttcacctgtgctgaatgtcaattgccctgctgttccgccaaaagcgaacgaggtattttgagctttgctgtcgtcaatcccattatctgatccactaacactcgtattatcatagaacttacctgttcctttgatttgaatggtaacatctgttcctgctgtacctgtaaatacacctctccactgattatcggcacgcttatattccattgtgataccgtcaattccgcttacttccagttgaggtattagtaaggcattccattgccttttgactgtattgacattgacaaaataacatccagattgtcctggaaaccacatatcccatgtaccgtcagctgcatccgttgtcagtaaaaacggagtgcctataccaccggactgagctgtgtgccaagttgttccgtcggcttcttgtacataaataccctcataagctgcagctccgaaaaatcctagatactgaccatctgcattggctgaatagaaatctttgccggagtcagctaccgtttctttgttgatgatgtcggcatagtgcatatcaatcggataaggagtcaccatcacttttactgtgttactgtatacaggagtaatgttacttccgttacttcctgccaatcggaaataaagtggcgcagcctcttctgctgttgcatttagtttataagcgatgatatttaatgcagaaactgtataacttttagaaagcccgctttctgttgattcaatgattgttccggaaaaatcttccgaccgtgatatttgtatggtagtctgtactcgggtagtcgcttgatagtttgcatcgcttatttgcaaagtctggtctgtccaagcaagtgacaaggcatatagcttggcagttgcttctgtcagtacgactgcatcggccgaagcgattaatgcgctttcttcaggactggagaggaagaacttgtctccgtctttttcgcacgctcccgatagcaggaggacgaaaagtaaagtgagtaggttatttatttttttcatatcgttgatacgtataagcgtgattaatagttttcattgtataaattcggattggcagtcaactcagttgttggtattgggtaaatgttatatctatcgtttactcctgtaccttctttgactccacctttccattgccatttgtaatcgtttgaggtgaacagactgtaacgtatcaggtccgtgcgtcggtatccttcccagtataattcgcgggcgcgttcgtctaggatgaaagataaggtaatttcatcttctgtcttattgttactattatcaccgtatgcccgttgttgtagatcattgatatatcctactacagtagtagcgtcaattcccgttccgcctcttttgaaagcttccgctatcatcagataaacatccgccaagcggaataagggatagtctgtatttactccgccatcagctgtattggaggccgtttctttcgagtcggtcaggttcgtccacttttctacaaagtatccattcgtctggtcgtctataatctctacgtcctgactttgtccggtggtgaaaaacatatatcgtttatcagtattttcatatcctgtgaataattcaggaatattgcctcgtacccggaacattccccaaccactctttacaccataatcctctggtttctgtaattcggatgtattacttactgccccgcaaacgatataagtagaagacccccatgatacggtattcgttgcatccactggaagggtgaagattatttcattggtacggagatggttgtctgcattgaataatttcgcataatcgctttccaatgaatacccttgtgctatcacattcttgcaggctgtaatacacttcgtatacatttcctgattgtcggtgttggtataaaccttcgcattcagatacagttttgcctgcaacgtatatgccgctcctaatgttgcccgaccgtacatatcacttccgttagcagacaaacaattattcgtatcacttgtatttgtgattgcattcagttcgctttcgatgtaattgaaaatctgcgctcctgtatagcggggaggtagataaccgaccaaaggatcattttccgttatgaacggaatattgcggaagaggtcgagtgcgtgatagtagaacaaagcacgcatgaagcgggcttccgcacggtaagtacgtatttgcttttggtcatcggcggagaaagagccgattttatcatccgttgcgttgcgtaggaattcgttacataaagcgatgttgtagtagatacgataatacatgtccgatacccaagggtcgttggcgtcccaacttaaataagtcagtcccgttacattgtcaccggatagccaagtagatgctacttcgtccgtaccgcattcctgcaaattgaaatagcaacgcatataatcctgaccactgttactactcaaatcttcgttaccgtttttttcctgaccggtagttaccatggaagtatatattttccctaagacagacttgtagttttccgcactggtgtaaatggacgacgaagtttcgtctacgtgtggatattgatccaaatcgcctatacaggaagcgaacagcaacgtgctgcaaaagtaaaaggctatataaaatatctttttcatgattggatgtttttgataattagaagttaagaccgatatttagggagaatgtacgcggacgggggtagaatgagttatccactccgttgggaacttccggatccacaccactgtatttggtgatgcagaatacattctgaaccattgcactgacattcaggctacatcctttataaatttctccgaagttgtatcccaatgacaggttatccatctttaagaaagaagcattctctacataataatcggatagatactgacgtgatttaaatccggtttccagataacttctggaaagattattcaattgataagagttatagctgaccgtctcccaagctccggcattcattgccatggcattgtaaacgtagttgccgatattggcacgcagactggtgcttaacgtccatttcttataacgcagtgaagtgctgaaaccgagaatgtaatccggtgccggagaatgatagcgatataaatcattggtgttgatttccccgtttccgtcgaggtctacgtatgcgccttctaccggtttgcctgtcttttcgtcatatagctgatggtaaacgtaaaacatataaggtgcgtatccttcacttaatacttgcaattgatagctgtcgatgtacggccctacggaagtgttggtagcttgagtaccggctgcgagtgaaaggtttttcaccttcatcttttgccaagtcatgttgaaactcaaatcccaattccagtcttttgtttgtatcggagtagcgttgatactgaactcaataccttcgctgtctacattgcctacgtttgtggtgatattgcggtcgaaagtagtacctgctgcagccggtacggttgcaatcaagtctttggtctggcgggtataatagtcaaagctaccggtgatgcggtcttgcagaaaaccgaaatcgaatccggcattccatgaagtagtcgtttcccacttcaggtcgggtacgtaagcctccggacgatacgtgtggatcgggctacctccaatcagggaggatgcaccgctttggctgatattgtagacaggtaggtaattataattaccgataccgtcctgctgccctgtcacgccgtagcttgcacggagtttcaatgtacttaatatcttgttatctttcaggaaagactcttccgtcattctccatccgagagctactgaagggaaagtaccccagcgtacattttttgcgaaacgcgaagtggcatcccggcgtacggttgtcgtcaacatataacgtgagtcgaacgaatagttcagacgaccgtaataagataacagcacatgacggtcatcggtagctttggatgttttttgaatttctccgagtgtatttgtctcatagtagagcggggtagtggatttccaatattgatagtcgtaaccggctgttacatcaaaactactcttgatggattctaccagtttattgtaattggcatataaggtaagcaaacggtttacctttttctgcggtccgtaagtatagtccaaaccggaagttgtatagttttgtgccgcctcagccgggacatatacacttcctttaccttgtgcatagtcataacccaatgtagcgtgcaactttagatcgggaaagaaatgcagccggtagtctgcatcgatatttccgatgaaacgtttcaccgtactgtgagaatcattcattttgagaagtccgaccggattcatgaccgctccgttcacgggagctccggtgttatcgatagcttccgtatatccgccgaaattgtctgctcctgaatatacgggaatggtaggattcatggttgccgctgcccagatagctccggtattggcgaatgtatttttgttgatagaccctttggcattgatattcagtttcaagtggtctttgaagaaagacggatttagcgtgatgcttcccgtataacgttccgcattgtccgtgcgtaataacccgctttggttgtaataaccaacggatgcacggaacggcaggtttttggctatctttccggcaacgctcagattattgtccgtaccgaatgcgttttgatagatttcatcgttccaatctgtatgtgcggtgccgagtaatgcctgttgcgcatcggtacctttgctttggatggtatttacgaattcgtcatagctcatcatatccgccagtttggtacgtgtctgtacggagttagtcgtgctgaaagtaaacttcagtttgtccgaacttcctttcttggtagtgatcaagataaccccgttggatgcgcgcgaaccatagatagctgtggaggatgcgtctttcagaatggtcatgctctcaatatcgttcgggttgatgaggctaaggaaattgccgtcgttaccactgatacctccctgttccaaaggaacaccatccaatacaatcaaagggtcgttgctggcattcagtgaagcaccgccacgaacacggattgtacttcccgaagtaggagaaccactgttggacatgatttgcacaccggatattttaccgtttatcagttgttcgggagagctgaccaaccccatattgaagtctttgctgctgacgtttgtaaccgacccggtaaggtcgcttttacgttgcgtaccatatccgatgacaacgacatcgctcaagacttgtgagtcgcttttcatctgaatgttcagtgtagcgctgcttgttgggatagctacaatcttagtttcgtatccgatgtaagaaaattgaagttctttattgccttgcggcacattcagcgtataattaccgtcgaagtcggtaaccgttccggtagaggtacctacaatgagaatacttactccaatcataggttctttgttttcatcaatcacttgtccggtgattcgtttgcctccttgctgtgcgaagaccgaaatcgtgcctcctaaaagggctgtacacaacatgagtagtacagtcagatggcgtagatttaagatattactgttcataattactgtgttattgataatagatttgttattatatttacttttagatcaggttctggaccgagtatagaattactttatttattccagccagatttcccctagctcgatgatggattctgtcttgtcttttcctaatagagacaattccagtttctctgccttctccatttggaaaggtatgtctgtttccggatggaaatattgtttcagaaaagtcggataagctatcggaagtaatgccgtgtccgcttgatgcaactttttcaaagggatacgtatgattccttccggtgaaggggtactgcaaattgttttgtatgtatatccgtctgaagtgatgaatcctgcatagaatccttcagggagattcttatggcggttgacacggatgcaaagagtggtgcaactctttaattttccttttctttcttttagcacgtcttgaatggatttgcgcaggaagtgctgtgttttctctcctttggatgtgaaggcgaaacggagtaatggcttttcaatcggagaaaaatcgattaaggtacgtttcaggtcgttccattcgggaagcgtataggcttctatgccactatgtgtgtctgtcacgctcaataattgtattggactgtcgggagcgacaatacgggtagtccaatatgaatcggcaatgtaatcccaatccaacggatttccttttattccagaagaaaatccctttacggaatttccggcaggataagtacgggtactgtcgccccgacagacaataatgttatacttaaaacaaccttcttgtagttctgcggcaggaattgtagcttgatagctatagccgcttatacgtttcatcttgatagatggattatgatcattccagaaagatactttgtctgtgtagataatcacggagtccggagaagtgtttccaaccacttgcgcaagaattgttaaatctctgtctgcttcggtgacttgtgcaggattgtggatgactttgtaatctgttgtatgcggggaaggggctgcaaactctccgagacgaatggaattccatcgggaatctgttgtccaattctgcttcggtgtgcagttcttgcgtttcaacaagtaaacacccggttgaagattacggataactccgtcttttacagtctcttctttccgttggttttctttattgagtgcggtaagagtgaatgattctcctaaatcgggaatttgaagagccatatcccaacaaccatagataatgctgactacctctttggcaagtgacggtttggcaaacggatcgctgactgtcactgcatccggcattacttccagcctccatactcctgcttccagacagtcaataaaatatgcaccggttccttcgtaatgtacgacgggagaactgccgcaaccggcaatggacataagctgtgaagcattttggggcaggctgtgggtattgttggaataatagtatttccttccattattcagctcgcttaaattctccgtatagctgacacggaatccgtcaccaaacagtgtatcttgaggataactaccgtatgattctcctcttctcagattgcgtgccgcttcggcagcaattttcatgctgattgctttgtgtggtgtataggcaagattcagaaaatgagtctggtattccgtattggcgtatgcaatgtccatcgggtcgtatgcgaactgcgtaacccattgaaatcctgccatacggaaagtacgtgccatagccggatacatataggaatacataatatctgccgggtcgaattcgtaaatcaggcgtgccttcttgtgaaatcctttcaccttatcggcaaaagaaatatcatagcggtctatatagggaagaaaatttccttgttgcgtttgtccggataccagtccgataggataccattgataagtagtgccttgaatggcagtctcatagtatgcttctaccacatattcgttgtggcttacattatagaagacaggtttacggttcccggttctatgaatcgcttccaacattcggttgatatatgcctttacctcttccttcgtaccggagtggcaaggttcgttattgatttcaaatcccactatggaaggatcgtccttataggctattccggtataaggattgatatgtttcactaggttgtgaagataggtctcttgtgcggtaatggcttccgggtgagagtgcacgtcgcatttatcatatttataagagaaaccaccggtctgaatgttccgttccgggtaaccgtttccgaaattggtttgggtggtgataacaatatgaatgttccgttccttgagtttggcaatcagatagtccatcaggtcgagatgctcgttttcaaggagatttccttgctcgtctgtgagttcgacatcccaaaggtggatacggtaagcgttcaatcccaaacgggtgatatgatatacgtctttatctatagcagctttacgatcaagtcccagataacctaaggcacgataggcatgggcaaaggggagtgtgtagttcacaccgaagaaagaggcttcctggcgggtgtcactccaacgtatcactccgtttccgtctatatatataaaaggtgtagaagatgatttcccttgtatattgacaaaggcgaataataaacaaatggaggtaagaataaataatcttttcatgctatcaaatttatcggttcattgatagtgacaaaggtaaattattggtaaatcaggtaaaagcacagattggacatataaggataaaaataggacgaaatgctttagaatgcccctacagctcttcatttaagtattgacggggtgtttttccgaattccgattggaaacatttggagaaataagagtgattggaaaaacctaccatatacattacttcggcaatggtgaatttcttttgttgcagtaacattgccgcctttttcatcctgatcgatttgatatattccacaggagacattccggtcagttgtttaatcttccggtagatctgtttgttgctgaagccggacaattcgcatagggcattcacgttcaggtctgcatcggaaagatggtcctcaatcaggcggatgatatttgacaagaacttctcatcttgtgattcagcttcgatgggtttgagcacaggcaatgactctagcgattttttggtttgatgactaggggtaatttcttcttcttcaatggcggtaatgggaatacttagtcctatgcttgtaccttgattctctttggaggtaactccgttgatatgtccgccgtgcagttccgtataggtcttcaccaagtaaagcccgatacctgtaccttccttatttcccgaacggggggattgataaaaacgttggaagatatatggaatgtcttgttgcggaattccggttccggtgtccgatacacaaatgtccagttgtccggtttcctgcgaataaaaaagggaacaccgcacgcttccgctgtcaggagtatattttacggcatttgagagcagattgtccagtatcacacccaatttgattgcatccatatccgcataaattttggctttgttcgcttcaaaatgaaaagtgagccgggaattctcttcgtaaacggagaacaggctacggctgaaagataccagttcgatacgcgacagaatgagtaatgaatccgcattaccctctatccgattgaatttgagtacctgatgaatcaacgaatttatcttcatggcgttgcgctgtacttcttctaacgtttgtttctcatgttcagtctctgtggcaggcaacaactggctgacaggagctataatccggctaagtggtgttttcagttcattggataggtttgtaaagaatgccattttctgacgtgactgttccaaaatcttctccttctccaggcgttccatcttcaatcggtttttaacccggaagaaattgatagtccaagcgaccaggcttagaagtaaaaggcaatagattatttttgcccaaagcgtataataccagggcggcaggatctttatgtccaatatataaggatgttccgaaggaactccgtttttttctactttgctgatagataattgataatccccataactcaaattgctataagtaatacggttcgtattggatggcagaaaattccattctttgtccatacctccgagccggtaaacgaatttattcttttcttcgagagagtaggggaggtcggacagctcaaaagccaaattattctgattgtacttcagttcaatggcattggtgtaacgtatattgggaatattcgctatgcgtgggttcatcaattgattgttaatgtacaaagctgtcaggagaatgggacgttcgggacgattcatggcttgtatttctgggcaggatatggcaaaaccgtcagcgcctcccaaataaacatttccgtctttcgactcgaacagcagactggtaaaacgcttatccgtcatattctgctgacgcgcatccatcgtttcccggttgataatccaaagcccgttcgtggtagaaacccatatatggtctttgaccgatgtcatggacaaaatctcgttattattaaagttcccgaaagaaatgctttgccgactggagtctttagggttgatacgcattactcccccgtgaaatcctacccaaagcataccttccgcatcacatagtagataattcgggcttttttctccgctcaactcatcggaaaatagtttggtgacttgctttgtgcgtggattgattttatccagccctttactgttgtatagcaatacccatacattaccttccttatcgggcataatctgattgataaacatacccgacagtccattgtgaatagagtaattgtattcggctacgtattgtccgactttagattgcattaatttatgcttgtctactacaaagattccgcctaaacaggtggcgatccataggtttccggaatcgtcttcgaagatgtaataagcccaatttgtattgtaggttcctgtgctgtcgataatgttatagtgtacaaactcttgtgtcgtatagtcataacggttgatactgccatctgtagctatccataattgctgctctttatcttcatagatatggcggatacgattgtgtgataaaggatgtgctttatctcccatcctgtaccagacagcctcatgtctgtttccggtaggatggataaaacggagtaatccgtttgtgccgccaaaccaatacatccctttggaatcccggaataacgagtagaattgatttccgtctcctgtacccgttatttgagagattggtacgaattgcaaggcactgttataacgcgacaaggagataccataatcagttcccagccagatattatgttcctggtcggaaaagatattccaaatgatgttgtttgtcagcgactggatattacgtgaatcatggatgatatgttgcaaagattcctcattgttttggtacacgtaaagtccgttatctgtaccggctaataagtttccgtttccatccaatgccaatgatttgatggaattattgtggaaaacttcgattgcaaccattttttctgtttcaggagtatattggagaagatatccttccataccgatccaaatacactgtcggacggtatcttccaataaagagttgacgaataaattacttatcccatgagtgacaggtagaaaaatatcttcaaactttccactttccgctatataacgacataaaccattgtaagtacccacataggtctgcttctctttcgtgtggataatcgaatagattgtattatgggataaaccactatgcttactgtcgaaacgggttaatttccggttttctaattgataggtatagagcccgttcagagaacctatccataagattcggtcacggagcgccattgtacggacatcggtaggaaaatctacctctggctgttcatatctgtctgtacggtagttgtaaacaagtattccattatccgtccccagatacagatatgtattgtcaatgataatgccgcaatagatacgtgtgttcgtcagttctccataagtgaaatgttgttgggtggaatagccgtcgtaactgaataaacctttattggaacctatccatatcatcccttcgctgtcttgcagaaagcagctgataaccgaagcttccgtaccgagataaatgttttcgaactgctgataattcactttttgcccatacacatcacgatggatgcagaatatgcaaatgagtagaagtatcaatttaattcgtaggtacatgatatcaggtttgcaagttttacgttgcaaatgtaggaaaaaatgtcggttacacttgtaaatatccgcttctttttgttcctttgttacctatttataaacggaaagcttatatatgagaatactaatttatttgcttttgttgccattaatggtggttgtggttgcctgtggcggcaaaaaaggagcttcagacaaagagtcggtattagcgacaatggatagtgtggatgctcacggattgcaacgtatgcagacttccaaaagcgaaacggactttaaatttaaaggaaaagattaccattccattgtttcacgtactccggacgaaagtttgcctcatatcaagaatgaaatgggagatacttatgtagacaataagattgtactgcgtctgatgcgcggaaacgagaaagtttttgataagacgtttaccaagaatgatttctcttctgtggtagacgcgaaattcctgtcgaactctattctggaaggaatcgtatatgataagactacttcgcaagggatagtgtatgccgcaagtgtctgttatccgcagacagatttgtatatgccgctctccataacaatcacttcagacgggaaaatgaatataaagaaagtggatatgcttgaagaagaatatgatgatatcccgtctaattagctcttgggatagatatcgacaatggaattgcacaaatgtgaaaacatttgagacaaacggaaggcgacctatatggttgccttttgtatttttgcaccgttaaaaacttaataccaaccatagaatgaagaaatacattttggctatctgcgtggtagcagtaagctgtacggcactgaacgctcaaacaaagaatacgcaaacattggtcccgctgactgaacgggtaaacgtacaggcagattcggcacgtgttaatcagattatagacggttgctgggtagcagtcggctctaaaaagtcccatgccattcagagggactttactcgtatgtttaacggaaagccttcttatcgttttgaactgaaagaaggcgataatacactgtcgggatatgccaaaggtgagaccaagggacgtgcggagttctcatactgttatgcaacatccgatgattttaaagggaaacctgccgatacctataagaaagcgcaaattatgaaaaccgtgtatcatcacggaaaaggagcttgcccgcaaggctcttcacgtgattatgagttttcggtatacatcccttctacattgggcagtgatgtttccactatttttgctcaatggcatggaatgccggaccgtacattggttcagactccgcaaggagaagtgaagacattgacagtcgatgaatttatagaattggaaaagactaccatttttaagaaaaatgtgggccacgagaaaaaggccaagttggacaagcaaggtaaccccgtaaaagataaacatggcaatcctgtatatacagccggaaaagctaatggatggttggttgaacaaggaggctatcctccattggcattcggattctccggaggatggttttatatcaaagcaaactctgaccgtagatggctgaccgacaaagatgaccgttgcaatgcaaatgtagaaaaaacacctgtcatgaaaccggtaacttctgaatacaagtcatcgactatcgcttacaaaatgccttttgccgatttcccgaaagattgttggattacattccgtatccatattgattggactgtctacgggaaagaggctgagacaattgtaaagccgggtatgcttgatgtacagatgaattatcaggataaaggtaaaaaggttagtaaacaccttgtagacaatgagcagattctgattggacgtaacgacaaagatggctactattttaaatttggtatttatagggtaggtaacagcaccaaaccggtgtgttacaatttggcaggttattcggaaaagtaactccggataacaagctgctgttagagaaagttaaagattggcaaactcataatattccagaatctttttaggttctatatcgttatttgcattataaaaacaaagtgtaatattaatgctaaaaggataacgattatgaagaagattttatctttacttgtattggctatagtggccgtgcagttctcgttcgcagctgatgtgataactaaagacatcaaccaattgccgcttcctgcgcggaattttatcaatcgtcatttcacaaagcctgaggttgttcagattaagattgataaggatctgatggagtctactaagtatgaagtcttattaatggacggtacggagatcgattttgacagtagggggaattgggaggaagttagcgctaagaaaggaaagactgttcctgcaactgttgttccgggatttgctgccaattatttgaagactcataattttgtgagtgaaggtgtgacgaaagtagaacgtgaccgtaaggggtacgaaatcgaattgtctaccggaatatctttcaagtttgacaagaagggcaaatttttgaaagcggatgattgagtagttatatgtagataaacctaaaccggaagattgttatgtggaaatttaagtttggcttatgggcagtggttttgataacctctgtcttttctttcagcgcatgtggtgatgatgatgataatgatacttttgttcctcctgctaatattgaggtagctttgaaacaattgtatccgggtgcgcagaatatagaatgggaagtgaaaggtgtttattatgtagctgattgttgggtgaccggtgatgaactggaagtctggtttgatgtgaatgccaattgggtgatgacggagaatgaattggataatgttaatctgttagtaccggctgtttatactgcctttatggattctgactataacacatgggtagtgacggatgtgtatgttttgacttatcctttgaacccgactacctctgtcattcaagtaaaacagggcagccagcgctattcactttatttctcacaggaaggcggattgctccatgaaaaaaatattagtaatggagatgataccaattggccgccaactgagtaggtgaattgttacatctgttggtagtctttagccaatcctccttcgcttgtttctttatagagggagggaaggtcatgaccggtttgtttcatcacttgtacaaccttatcgaaagaaacgcggtgcataccgtctgtaaaagcagaatagaggttagcgtccagcgcacgtgctgcggcataagcgtttcgctcgatacagggaatttgtactaatccgcataccgggtcgcaagtcattcccaagtggtgttccaatcccatttctgctgcatattcaatttgtgcggggctacctccgaatagttggttggcagcggctgaagccatagcacaggcaacgcctacctctccttgacaaccgacctccgcaccggagatggatgcattgaatttgacgatattaccgataagccctgctgttgccaatgcgcgtaaaatgcgcatatcactgaaatcacggcttttctgaaggtgataaagtactgcaggcattacaccgcaggaaccacaggtaggtgcagttacaatcttgccaccggaagcattttcttcacttactgccaatgcgtatgaaaaaacaagccctctggattggagagattgcttgtatccggtggcacgtatataataggtagaagcttttcgtctgagatttaacggtcctggcagcacgccttccgcttccaggccacgatgaatggcgtctttcattgtagtccatacctctgccaaataatcccagatatcttcgttctcacattcttttacgtattcccaataactttttcctgtacgttcacaccattgcagaatctcggtcatgttgttcatcccatatacttccgggctttcgatagtcgggctatcgttgttttctgccagtgcaccgccaccgatactataaactgtccaattttcgagtactttgttactggtgtcgaaagcagcaaatgtcattccattcggatggaacggtaggaaaactttgggttgccacacgatttctacaggagcaaccgcctgcagggtgtctataatggccacatctgtcatgtgccctttccccgtagcggctaggctgccataaagggttactttaaaagaaactgcgtccggatggcgttccagaaacatttctgcggctttacgcggtcccatagtgtggctgctggaaggacctgtacctattctatataactcttttattgatttcatgactgatgatatattttcgttaataccagtttttctttttgaagaacaaatatacgataataccgataattcccatcactaaccaggcaaataaataaccatatcgccaatccagctccggcatccatttataattcattccccataccccggccagaaaagttaggggaataaagatagtggatacgatagtcaggcgtttcataatgttgttcatgcgcaggtcattgttggaaatataaaggtctaccaatgaagaaagcgtttcccggcagatttcgatggtttgcagtacaaactggagatgatcgttcacatcattgaagaaagcacggttgactttatggataagcaggttttccgcatgtaacagttttacatattgttcttttagcggaagtattgctttcttcatcagcatatattggcggcggagtgcctggatttgaatgcctatatcatatccttcggtgatggtgagcagttcttcttccagatcttcgagagcgtcatcgatagaagagatggttgaaatataatttcccattacactattcagcagcacgctgaacaaatagtctgtttggcggctgcgtattttcagaacgtcattgcgcaaggctgtattgacatcgtcgaagaagtcggtttctttttcgaggaaggtaagtacataattacttccgagaataatgcatacttgttgttggagcagttcgtccaactcgtcctctcccttatgtgtattgggatagaataatttcaagatcaggacaatatatttatcatgctcttcgattttggtggggtggtttgcatttagaatatcctgtaatacaaggaagtctatttcgaaatgactgcaaatttcacggatggtttccgtatctttcatcccgtgtacttgcagccaattgatgtgcgtattgtccaatgtatctttgattgattggaaagtattaccggatgactcctgtatttctgtcgtactatacgtgcataggtgcaaatgggtaggagcgagactgtctccggtataaatcagcttttcgcttaataggttattcttcatgctttgttctcgtatttagacgtttttatttataggttagtcaaaatcaactacggtgattccggcacccccgaattgtacgtgttcgtcagcataatggctgatccccggtacagtagagaggtattggcggataagcgtacggagtattcccgtacctgttccgtgaagaatgcgcacgcggtccatgcctaccaatatagcatcgtcgataaagtaggtgactgcttgcagtgcttcatcgccacgcataccccgcacatcgatatcttgtttgaaactgagtttcttttcgtacatctgatcatgtgtctggctgctgacaaatgtactcttggcaatcccttccgtcttttgaggagcattgctgcgttcgatacggtctatctttacagtcgttttaatgcttccgaaagcgacaattgcatttttgccgtttatttccatgacttgcccaacacttgtctgtcctttgatttttacattctcgccaataccaatgggagtcactttgggaacaatgattgttggggcattggcagctttcggttcgttctttttatttttcttccgttcctgcttttctttcaacttttccattttccgtgccagtttttcttcttgttctttggaggctaatgcgtccaaagaagtgcggaagtcagtcagttcttgacgtgccagacgagtcttttctttttcggcctgtgcttctttgatggtgcggatagtattttcaatacgggcatttgattcttgcagtattcgttccgcttcttcctttgcctgtttgataatctcttttcttgacttttgcagctcttccatctccgtctggtaacgggcaatggtttcttccatctgtttctcccgttgtcggatggtttggcgtttaccctcccaataacgtttgtcgcggacaatgtcttgcaagtatttatcagcgttgatgtattcgcttcccacaatttccgaagcgtctgcaatgacatcttcgggtaatccgatttttcgtgcgatttctacggcaaacgaacttccgggattgccaatctgcaattggaatagtgcctgcatgagatgacggtcgtaaagcatggctccatttactactccttcatggtcttcagcgaaatgcttcaggttttgatagtgagtggtgatcactccgaaagtttgtttccggttgaaacgttttaatacggcttcggcgatggcgcctcctatctggggttccgtaccccctccgaattcatcaatcaagatgaggctgcgttcattgcagtttttcatcatgattttcatattggtcagatgtgaagagtaggtactaagatcatcttcaatggactgctcgtcaccgatgtcgataaaaatactgctgaatatacctgcatgactgcgttcgtgcagcgggatcaacattccgcattgaagcatatattgcagtaatcctaccgttttcagacagacggatttaccaccggcattcggaccggatataataaggatgcgttgtttttggttaagctcgatatccaggggcacgacttttttcccatgtttggctaatgatagctgtaacaggggatgaacagccattgtccaatccagtagttgctcattttctatagctggtttcaaacagtttgtctgtattgcaaaataactttttgcgcggataaaatcaacttctgccagaaattcatacgactgtaagatttccggaatagacgggcgaagggtattggagaactcagtaagaatacgaatgatttcccgtcgttcgtctccttcaagttcacggatacgattattggcttctactacttctgcgggttctataaatacagtctttccactagcggattcatcgtgtacgattcctttgattttccgtttcagtcccggagctacagggatgaccagacggccatcgcgcatagttggagttacatccttatctacgtatccttcggattgtgcgctacgcaagatactgttcaaagatcgtgagatacttcccattgtgctggagagttcacgacgtatgcgtgctaattcggttgaagcgttgtctttgattttaccgtatttattgagaataccgtctatttttccgattaattgcggaaatacggctatatctccggctaatcgtttcaggctggggtaaggggtatcgctttcttcttcctcttcattccgatgtaggaagcgtacgatatcgcggattgtttccaatgaacggcgtaagtcaaacagttcttgttcgtccagatacatgccttctatccgtactcgtttcaatgaaggacggacatcaaagaagaactgatcgggaaatccgtcttcttcttgaatgatgcggataaattcagttacttgatttaatttctcttctacttcttcgtattggtcggaaaagaccatatcagagactcgttcctcgcctaaagtgctgagacatctatcctttagtagctgtcttatctggtcgaatcctatcttttgctcaaaattttgaggatatatcatatttctatcttgctaatggactgcaaaaatacgatttattcgcgaaaaaaatatcagaatgtttgcagatttaaaaatgattcgtacctttgcaccgctttcaacggaaagcacttctgataaagaagttttggagaggtggcagagtggtcgattgcggcggtcttgaaaaccgttgaaggtaacacttcccggggttcgaatccctgtctctccgctgaaacaaaaacgaaggacttcacaaaagccttcaaaaagtcattcaaagcaccgtatatcagctgattacggtgcttttttatttttgcgcctcaacaagatgaaggcctgaatgtagggtttagccttcaaagttcggtcattatttgctacatttactgctacactttgaagacccctcaaaaaaatgtagcagtgaccgaaaaatgaagcccattttgaagcctataaaatcattgattcataactgattatgtagaactttgtagccatggtgctacattaaatttgagtcgttatgagaatgatttttaaagtgtcgtactatgtacgttcaaactacgaaaacaagcagggaaagtctcccttgatgatccggatttttctgaatggtgaaatgctgaatgtcggttcttccggtatctacattgacaagaagctatggaacaattccaccaaccgggtaaaggggcgtggaagcgaatccttgaatctgaatgcccagttggacaacatctcaaattcgctgcagatgattttcaagaagcatgaatttgacgaagacctgacccttgacaaaatcaaaagtatctttttgggcaagaataaggtcaagactacgtttgtggagttctatgacaagtatctggaggacatcaaggctcaggttggtgcaggtaaaagcatagccttgtatcacaaatattcggcagcccgaagccattttgtgaatttcctccatgccaaatacggcagaaaggatctcatgccgggtgaactgacgcatctgattatccatgattttgaaatatacctgaagacagtggtttccctgaagtcaaattcggctacaaagacgctcaaattcttcaagaccgtggtcatctttgcccagaagtgcggtgtgatgacgcacgaccctttcttgaaccaccactttcacctggaaccggtggatcggggttttcttacggatgaagaaatacagcgcatcatgcagaaagattttgagatacctcggcttgaaatggtaagggacgtttttatcttttcctgtttctgtgggcttgcctacatcgacgtggctcacctgacgcaggaaaatatcatcacccttgataaccgtccgtggattatcatcaaccgtcagaagaccaatgtgcagagtaatatccctttgttggagatacctcaaatgattcttgacaagtataaaggaaagactaaagacaacaggctgcttccagtcctgtcaaatcaaaagatcaatgcttatctcaaagagattgctgacctttgtggaatcaagaaacgtctcagctaccaccttgcacgtcatacgtttgcaacgatgttgctcagcaagggtgttcccattgagtccgtttcaaagatgctgggacataccaacattaaaacaacacaaatctatgcgcgtatcaccaacaagaaaattgagcaggatatgatgcaagttgccgacaagtttgatggcttcaaaaactgtttcatcaattaaccgacttgcttcagttcaatccttacttcgagggaaaagacccgttacacctttaccaagccgtatcattccaacaggaagatacggctttttccatatttgtacctttcctcatgccacttttatccgtccgaatgctgccggaacagattgccggaaataaccagcacaaacgcaagcgtcaccagcttccatatcaagacaaaagttttctttaccagccataatgccaaccgcagcattacgcgaataagccaaagtgccaaccgtatcagcaaaccgataagaacgcagaccggcaacatatatataaggagtaacagttcaaacatggtcatctgtttttagttataaaaaatctctgccgaggtagattgttattaccaaatatactaaaaatcaatgagatacgcaagaaaccgtctgtattttattcgtgtcaatacatgttctttcaacctcattttctgcattttatgaccatgaactcggtgcttgtcaagcattgtcactctgcaactttgaacatcatgttgatatgcccgaagttttgaatgtccagaatgtgtaggttctacaatacgattacaccttattctttttatccctccgggttcagttccataattgccagtaccattgttcttttttcccttttatcacagaacgcatgtttacagattttcattgctgaatgctcttttccttgtgttgtcatggctatttggatgacaagcaaatataaacataggttgaataaagactgatgccatagctatatgtcctattgtctttcagctaatggccacatggcaatatgattgcacattcttctgtttacagatttgttgttcctctgtctcttgtttcactcattatgaaaactgtgcaacaccaatcaaacaagcgcaggatgatacagccatgtaactggcatgcctccgacagctaaacttcaaaccttgtttctatagccacatgaacaaccgtcagtttctacttcatgcttcgtgaacatttcaccatgatatggatgaacaaggagtcaatgaacaggagctttggaaacctttgaatgcaagtcccagaatgcttgatacacaggtgaatttgacagaagattttctctcagaaagatgttgtgcatttttgcgcttcgcaaaattttgcggtaatttgggtctgaaatcatcccggaagacatcgaactgcgttgcatatggagccaagcaagttgtacccttgtcattacaaaacaagttttgtcctcacaagggtaacttgccgactgccgtgcagcggagcgatgtgcatcgctgtttcgcttcgcgaaagaggtgtccgggaatccgaacaactaaagtcaaggcatatgaaaaaccagcgtaccaaagtgtttcagttacggcttacctccgatgaattgctgaatctgaaggaaaaagccgttccctaccagtccgtgagcaattatatccgcaaagcagttgaagaatttacccatgtggatgtcaaacaacagattgagatgatgcaggatttgtgtgcattttaccgaaagttccagaacgaactgtcctgggctggcagcaacctgaatcagtcggtcagacgggtcaacgaactggcggttgccggactgctgtcacccggttatgtgaatgaagtcttgctcccttcgattcaggatgtacagaacatcttgaaaaggataaaggatgacttggaaactttgaacaacagaacacggctgattaagtaaaggtaaacggatattttgtatttgggtgtgatgaatagactaacctgtatccggttttacaagcgaccgggatttttaatctgtctggtccgcaaccccaaatttcatgaatcagcaaacaaatagataaattatgatagcaaccatacttcccggaagcgcagacttccatgcagtcggttacaacgaacacaaggtctataaaggagtggccaccctgctggagatgcagaacttcggtggactggaagcctcggaacatccgaccgccaaacagctggtgcaatttctccagttctacagttcccagaacagccggattcagaaaccgcagttccatgtagccatttcctgcaaaggccatgaaatgtcggaacagcagttacttgatttcgcgcaccaatatctgcaggaaatggggtatgccgagcccggacaaccctggctcatctatgcccatcacgatacagacaacactcacttgcacattgtgacttcgagagtggcgcccgacggtcgcaagatacagcatgaccatgaacgtagacgctcgcaggcggtcattgacaagatactcggtatggaccggcagcagaaaacagacaaggacatagaggctgccaagcagtacagcttctcctcctttgcccagttcaaggccgtgatgggaaccatgggctatgaagtcttccagaaagacgggaacgtcttcgtcaagcaaggcggccgaatccaaaagaaactccccctgacagagattgaagccctgttcaagaaaggttatcaagacaaggcacgcaaccgacaactgagagcctatctgaaaaaaaaccgggacgtatgtgccaacaaagaagaactgcagaaggaaatgaagaagaatttcggcgtggatgtggtcttcttcggcaagaaagacaagccctatggctatatgctgattgaccatgccaacaagacggtcattcatggggccagagtccttgccgtagaagaactgctggactttgctactcccgaacaacgctttgaccggatagaagcatttatagaccagctgctgaccctcaatcccaaaatcactcagggagaaattttccagaaactcaagaaacagcgtgcctatataaagaaaggcgtcatctactacgatggccaaagcagacccttgccgcctttcatggccaaggctattgaccggaacaaccgcatcagcttcatcgagaagttccgtccgcagaacgaagccgaagtggaaatgctgtgcaaggtattcaaggtggaccggccagacctggtgaacatctccacggaacgtcctcccaagtatgccgattccgtcggccgtctgcatgaaatcttcagtgatcccgaagtgaagtccccccgcagcgccatgtatcaggaaggcttcatcatccgtcaggtcgatgatacctactatgccatcaacttcaaggaacatattctcatcaacctgaatgaagaaggcttcgatgtggaacgggtgaagaagaaatccaaaaagcagaagcgccagggtgtgccgtttaagaagtccaagaagaagacgctcaatccaatcaagagtttgcagcggaagtgtcatcagggactgggcaaactccggaaagaaggtatcggcagtcacagcgccaaccgcgaatgggaagtagggaaaaagaccgactacgatgaggtggatgatggacgttcattaaagatgtaaggaacttctggtcctttgcggaagaaggaaacacttgcttacgggaaagtaacattgttttgatcatgcagataaacggctctttgtgaaacaggatatggctataatccgtaaccggacaaccaatggggtccactattattttgaaagactttcatgggactgcctactgcaaccaattcgggcatatagattgaaaaactcaggttcatccgacttatttacccatgtttctgcaatctcaagcacattgatgttgtgcatttaggttttcaatatctctgcacatatttttgcttgcaaatttaattcaagtaaaaacgacatgatacagacccccgtcatagtaacctttgccaaccagaaaggaggagtcggaaagacaactctttgtgtgacctttgccaattacttggtgacgaaaggtgtccgtctggtagtaatcgactgtgatttccagcactcgattatgaagtgccgtaagacagaccttaaaaaatatggagaggaacaggttccttacgaagtatgggcttatgaaccggatgacaagacggccatgacctccctgattgaaaagttgcataatgatccggagattgatgtggtgcttatggattcaccgggaagcttgaaagcggaaggtctggtccccatgtttgtcaattcagatattatcgttgttcctttccactatgatctggtgaccgttccttccacagccagttttctgctttttcttgacagacttcgtcaggtagttggagaccgtatgaatgcacagctcttcatcattcccaacctcaatgacaaccgcgtaggaaagcgctcagaactgatactttgggacaacacacgggaaactttttctaattacggttatgtaacctggaaaataccgaggcgggctgatatggagcggttcagtacagtggctgcactggatatgcagattcgttatgttggcaatgttttcgacaagatctatttcagcattttcggcaaggtaactccagtgagggaggcaaagcttaccggaatacaactgacggataatcttaatccgaaaataggcaagaaaaaaaatcgggaagaaggtgttacacatattgccatggatgaagatggaaatgaagaagaacgcgaagcaggaggtctgtctgctgatacaaccgataaggaaaaaacggaatatgaatgacgagattaaatttatcagtaaccatcaaataacatagcgcatgaaaaaagacattccggaaattggtgacttgacacaaggcatcaatgattctgacattatcctgacgcacaagttgcccgaaatgttggaaaaatcatccggcctccaggatcggacgaatggtacaagtgagaagaaaacggaaactgacggagaacctatccatctttctccctcaaaggaggtggaagattattggacaggatttctgaaaaatttggaaatttccgatgaaagtaatgtcaaaagcgaacgactggtatgcaggctggaccgggatctggcagactcgctggatgactgcaacatccataaccgcagccgttcggatatggtcaatgccattgtccgtacattctttgatatttaccttctacagcttgtgccgtttcgcagagaaaagaaatcattgtttacaaatttcaatcaaaaagattatgagaaagaaaaggactaattggacagagcagaagattgcggttcttatccagctctatcccatagaaacaaccacgagaaccgcagaggttttgggtatgtgcgaacgtgctgtaaaagaaaaggcccgcagcttggggcttaagaaagcggtcaaaagccgttggatggagcatgcagattatgtacgcaatcattttgctcaccgatcttatgctgagataggcaaggaattgggaatttcacgggaatatgcccggcgcattgctgttagaatgggattgaagcgtactgcgttggaagattttaaggtgctttcacgaatccattctgatattatgcggagggaaagacgcagggttatcttcgggctgagtcccatcacccgcatcaaggttgtgtccaaccgggcacgggtaagactccgttcatggctcaagtccaaaggctacattgctggagaggaatacggtatcctttattatacggatgaccttcaccggattcaggaatcagagttgagaggagccaaactgggcttccgcttcctgccttatccgtcagaggaaaccattgtattgtcaaacctcctataactacagctatgacctacggacaagtaatcttaatcctctttgtggtcttgataggctactacggctttctgatattcatggacatccagcatctgaaggcagccgaggcagcagcgcaggagaatcaatccgaagaggaaatagacatcacggatgaagcccgttccttccagccccagcaggtgatccgggacgataagaagaaggaagaggaaaagaagcaggaagaagcagggaatgaaaatgattccaacacggataaacagcagacaacatctgatgagcaaccgaatgagaatgcttcttctgaaagtggtgaagatgtttccaatccggaagcatcaacagctaccgaacaatcagatattcctgttccggcagagaatccttcctctgaaacagtatcacagactcaaactgctgagccggataatacggatgccacatcagcttctgatgctacggatgaagatgaaattgaagacactacccatgcggatgccgaagcagccccatcggaagctggaacttctaccggatccaacttctcaccgagctaccgggaacccatcctgacagacggcatcctggtggatgacatcttcaaagccatcgaccagctggcagaaaccggtgaatgtgacctgggtaccattatctatcactgcgaaagcatgcgatatgccgggtaaatgcacccgaaaccaaccggacgaaagtccaccgttcctttagcgacctctgatacttgaatgacctctgttcctttggcgatgaaatccattatcaaagaaatatacaatgaaacaacttaatcaactcgtatgcggaaacccaaacatcttccgctctatccagcgctcttctgaaaaagcagtcaaccgccttatggcctgcagtgtggtacagaaatgtctcatgtttgtccttgccctctgggtatcggcaggtgaactcatggctgctagcaagggagctgcaggctttaccaaagccacccaggaagtgagttcctaccagactccggtgtcaaacttgatgaaagcgattgcggccgttatagttttagtaggagcttttaacgtttatttcaagatgcaaaacggcgaccaggatgtcaagaaaactatcatgctgactatcggtggctgtatcgcatttatcgctctttctgaggcgcttccgctcttctttaagtaatcaaatttgttaacatactattcagaattatgacgatgaatcaggagggttatcccgttttcaaaggcttgcagaaaccgctggagttcatgggcatacgcggccgttttctgacattggcagcagcggccatcggtgtgtcgtttgtaggttttatcggcttctccatcgctttgggaaagcttgccgggttcatcgccatgctggtcatggcattggtcggattggtcaccatttatgtcaagcagcgtggcggtctccacaacaaacggcgggcaaagggtatctatgtttacaagaatctgagacgcaactcgtaaaactatttcaaagattatggcacgtaccaagaaaagaatatttgacggcctctatgcacagctggaggaaacggacggcaatgtcgtccttttttcagccaagggggaaccgtcggttattttcgagataaccaatcccgtgcagcaactctgcaccgatgcggaacagtacatgctctttcaagatgtgctctccaacgtggtgcagacccttggcgagggctatgccctgcagaaacaggacgtgctctgcaagcagtcctaccaccatgaggtgccggaggatgcggagttcctgaccaaaagctacttccgttactttgagggaagagaatttacggagatacgtacctaccttatcattacgcaggaggcacagcggagccagttcgttcagtacgacccgaagaaatggctggacttccattccaaggtttctaaggtgagcgacatcttcaaggagaagaacatcaagcatcgcaaactcagtaaagaggaagtcaatgagtattgccaccgcttcatggcttttcagttccggcatggcccgttctccatgaccaacttcaaggcatcggatgagtatctgaaaatcggcgaccgggtagtccgttcctatccgctggtggatatagacgagattaaccttccttcgctggtgaagccctacacacagatgaacatcaacggctatggcatcgccacggatttgttctcctttctgacgggtgtgccccatgccgattgtgtggtgttcaaccaggtggtacagataccgaaccaacgaaaattactgagaaaactccaggccaaagccaagcgccacggctccatgcctaacccgagcaacaagattgcgaaggaagacattgaggaagtgctggaccgcctggcagtggacagcacgcagttggtctattgcaacttcaatatcctggtaagctgcccggcagataaggtcactccagtcacttcctatctggaaaccaaactgtatgagtgcggcatcatgccgtcccgtactgcctacaaccagctggaattgtttaccgacagcttccccggaaacggctatgccttcaatccggactacgacttgttccttactttatctgatgccgctctgtgcttcttcttcaaggaacatctaaagggttcggaagatactccactgactacttactacaccgaccgccagggactgccggtgtgtattgacatcacggggaaagagggcaaggtgaagatgacggacaatgccaacttcttctgcattggaccgagtggcagtggcaagagtttccacatgaacagcgtggttcgtcaacttttagaacaaaagacggatgtggtcatggttgatacgggcgactcttatgaaggtatctgtggctactacaagggaacgtatatctcttactccaaggaaaagcccatctccatgaacccctttaaggttacgaaagaggaatatgacttgaacttcggggaaaagaagaacttcttgaagtctttgatattcttgatattcaaaggcaacgactttccaagtaagattgaggacatgctcatcaaccagaccatcgtggaatactacgaagcctatttccatccctttacccaattcactgagaaggaacgtgaggggttgagacaaaagctgttggttgcctccaagatggaagaagactacgacaagttctcccacagcatggaagacattgatgcccaaatcagagaagccgagatggacaagcaggcggaaagcagggcactcatgcttccggcagaagcccggcgacttaagctgcttcgtcagtgccgttcgctctatgcccttgcccagaatgaagctgccagcaaaggggaaaaggaacgtgccctacagattatcgagaactacaagaaggaactctacaacaactccatgcttatcaagattgacaagcagatagaccacattgaggaacagaaacgcagactgaaagtccgggaactgtcattcaattcttactacgagtttgctttggaacgtattccgcaaatcgtggcacaggagaagattcagttcaacatccgcgacttcgctgccatcctgaagcagttctaccggggcggcgaactggagatgaccctgaactccgacctggacgtgaacctcttcgatgagcagttcattgtcttcgagattgacaagattaaagatgaccccgtgctgtttccgatagtggtactcatcattatggacgtgttcctgcagaagatgcgcatcaagaaaggacgcaaggcgctgattatcgaggaagcatggaaggcgattgcttcacccaccatggcggaatacatcaagtacctctataagactgtccgcaagttccatggcattgcaggtgtcgttactcaggagttgaacgatgtgatagattcgcccatcgtgaaggaagccatcatcaacaactccgacgtgaagatactgctcgaccagaccaagttcaaggaccgctacgaggacattgccgccatcctgggactgacccccatccagaggcagcagatatttaccatcaatgccctgaacaaccgggaaggacgcagctatttcaaggaagtctggatatgccggggacaatactcggatgtgtacggtgtggaggaagcaccggaatgctactgggcttacactaccgaacgtacggagaaggaagccctcaaactctatctggcccactacggaaccatgcaggaagccatcacgcatatcgaggcagaccgcaaacgggacggcgggcataagtatctggaatttgccagaaaagtcaatcaacatcaaaaagtcatgtcattatggtcaagttaagattcctgttgatggcggtactgatgcttgccgcttcaacgcaaatgtatgccggatggcgcatcgttgtggacaagaactgcatcaaaatcgtgtcgtccaaccttgccgcccagaaactcatcgaggaacagcacaatgcccggctggacaccatcgccgccaaacagcagaaggtggaactctattcggtcagcatggccacgatgaaggaactctacaaactgtcgatgcagaacatctccggtttcggtacggagagcctgtactacaaggaaatcggcagctgtgccctcgatatcatccggaatgtgccggaactgataaagacggtcagcaaggcgaagttcaccaaccagctctactgcctgacggaactcggagggctggtgatggaaacacagcagctggtgggcaacttcgtaaacatcgtgaacaatgcgaggattcccaatccgctcaagggagaaggcactgccgagaagaagagcgacggctacaacatgctcgaccgctacgagcgaatgtcactggccaactccatctacaccaatctgaatgagatccgctacaaggtggacggcatgatgctcatggcacaatatgccacgctgaatgacctctgctttgccatcgaccccgagggatgggctaacgtgatgaccatgcgcaaccaggtggacggactcgtatcggactggaacggactggtggctgctaactaaaagatgaaaaagctatggaacactggaaaaagaaattgggcgcaatctgtttgatgctattccttctggtgccgggtacggccaccgctgtagtcatacccaaggacctgccgaccattgaagcgctgatagccctgcacaagtgcatcaagaaggacgaggaccaggcactgggcagagtggccaccagcttcggggaacagtcgctggtaacgaaaggcgccaacaagttcaacgaagtgcggaccacgctgaacaccaagatgagcaatgcccattcgtacctggtactggccggagccatttcctccaccgccaactcgctctacatgctggtaaaggaatacaaggactttacctccaacactttcaagcatgtcaagaagaagccctttgtgggatggtattatgccgatgccaacgtggcgatagcccgggaagtgaagcactgctacaagctctacgcttccgtggccgcttcgggcatcaacctgatgaaggcttccatggacgagaagctgaacctggtgatgacgctcaaagccaccatcgacaaggcccgctacatcgtggacaatgcgaacctctactgctttctcatcaccgactgcggctggaaacccgactacatctgggaaatactcaactccaacgtaaaggacgagattgcgaatcgtgtcatcaatcaatggaacaaaggatatgcggtataaaattttattactctgcttgctgggcatgacggtagcttccggtcttcatgcccagcgtccggccaaggacaaggaaaaggcccggcagtggcagtccatggagaacggtccctgggattttgcaccggactggtactacttcttcctgcacaagaaatattcaggtgcggaaatgtactggaagtgggcaggattccaatccggcttccgggtgcgcttcaaggagcacaaatccaacgtgaaacgcatcatgcccacccgggtaacggcggaagaaacacagcgacagaaaattaagaaggtggaggaagagcgccagaagatggaagaactctatcaggaggaactgctccgcgaggcagaccgcaacgtggatctgatgttcccttcctacaaggacgagttcaatcggatgcaggactgcatcaccgacggactgctctactgcatgcagaaaagcaagggcaagctccagtaccaggtggacgaactgagccgccagaatgaaattctctgtgccgatatcgcctacatccacaagatgggagtcggctacggactggagaatgccaaacggcagaaggcttacgaggaagcccggcagaagatggaggaactggtcaaacggaccgccaacctctgtgcggtggcttccacgcaccattgacatacatgtttaggaatgagattctttgagaaaatagtttgtaacgaaaatagaaatgaaatatgaatctactgttagtaccattaaccatcggattgcctgccattgacgagagtctggacaagctgctggtcgccatggaaacctttcccaatgtggcggtgctgggtgatgccatcggactggcacgcatcctcggtctgttgctggcgctctgtgtaggctcctacgaatgctggatgatgatgcttggacggcgcggcatggacgtgatgaaactcctgcgcatcatcggcatttccatctgtatctcttcttcctcatggatctgtcaggccctgcaggttcccggcaaaggactggaaaccgctaccaaggccatggcaaaagccaagaacaaggaagtggccgctttcgagttgaaggtggcgcagaaacagagtgaataccttgaccggctgagagccgttcaggactccatttccactgcccagcaggtagccgctatcggacaggatgctgcctggtgggacaagctcatctacaacgtggagaacctaggcaacaccatcaacaactatgcccagcgggcagcggtggcggctgaaaccaagatgagcgaatggattaacgatgtcatccgttttgtgggggaactgatattccagatgtcctactacggcattctggtggcgcagcgcatcttcatggccatcatgatgattttctgtcccatcatgttcgccctgtccctggctccgccctggaactcggcctggagccagtggatgtcgaagttcctttccctctcgttgtggggcttcgtcacctatatgtgcatctactacatcgacttcattctgctttataacttgcagcaggacctcatagcctacaaccatctgcttcatggctcggtaaactcctgggagcagattggcgcactgggactgcagggcatcggctccaactgcatgtatgccatgggtatgctggtgggtgcctacatcatccgctttgtgcccgaagtggcttcgtggctcattccgggcggtatcagttcgggtgcaggttcagcagcaggaagtaccgtgatgggcatggcagcaatggcaggtggtgcagccggaggagcggcaggttccgtagtgggcggtgccatttccatgatcaagcccaagtccaagtcaggcaagaaataacctctaatcccaacgaatatgcttattgaatccttagcacagaaaacgaaactcgccctgatgacggtgctggccacgataggtggctgcaccctcatctgcgggttcaccgtctggtgctgcatctcgctcgtgacgaaagaacgcgagcagatttacatactggacggtgacatccccttcctggcacagcgtgctcggttggaagcgaacttcacgatggaagccaaggcccatatccagctcttccatcagtacttcttcaacctgccgcccgacaacgactacatcaagtggacggtcggcaaggcgatgtacatggcagacggtacggccctcaaacagaagcaggcattggatgagaacggattctactccgacatcatctcttcctcggcagtctgtaccatcatgtgtgactccatccaattcgacgaacatgaacggaaatttacctactatgggacgcagctcatcaagcgccgtacccgggacctgaaacgctccatggtcactacaggctacatcgaatcagtcccccgtactcgaaacaatccgcacggtttgatgattacgaactggaggacgctggaaaacaaagatttagattactaacctatagagaataagtaccccatgaaatcattcagaaagacacttcaggaaagtaggctcaagacgcatcacttgatacgttcctggctgcaacccaagttgggagccgtcggcacaaggtaccgcctggcaggacgcatccgtctggccaacatctgggcaagaaagcatcccaaacgcacctttgcctatgtcaccggttcactctttttcctgctggcaagtactgtgattatcgacagcatgaccttatcagaccaacgtgagccggatgtcagcagcattgcccaattggaacccatcttttccggattccgtaccattcaggcaaacaagagtgtacaccgtaccacgctgacggagttgacccatgaagggcagctgctccgggaaaaattggattcgttgatagcgataccgcataaaagccatcaggattctatccacattgtgcaaagctacaaccggctggaatccatcgtcaaatcacttaaaaacaatgaccatccatgatcagtaaaatcaatttcaaacagcccaagtacatcttcccgttggtggtgttcattcccctgtgtgccctggtgtacttcgtgatgcagaccttcggaggcagcgaggacgcccagcagacggttgccaccgaccgcatcaatacggaactgccgcaagccaatgcggaggaagccggagataaaatgtatgagatgtcgcgccgtttcggggacgaagatgccttcactgcgattggtgctatcggtgaagaacagaaagagaacgaggaactggagcacggctacagcgaagacgaactcaacaaactggatgcagcagaagcggaacggcttcgtcagcaaagggaaatggaggaactggaaaggtcgttggccgagtccagaaggcacatcaattcctttgcatacggaaatggcagtggagcatccaatggtggaggaagtcgctcagcgcaaagtggaggaagttctgcagccacagaaggctatacctcacaggatgacttcgcccgtgacctggaggaaatccaacgcagaagttacgagcgccagaaggccattgaaagcggattgggtatcggtcgctttgaccgggatgagttggctgagaaacaaagggctgattccatcgccaaagtccgtcaggccgaaaaggagcgcaatcgtcccaaacttgtcatcaaatctggtgataccaatgcggagaagtttcatacggtaacttcccccgatgatgtagctgaagccaaactcattcgggcgatgattgaccaaactaccaaagccaaggaagggaccagacttcgtttcaaattgctggacgacattaccgtctgcaacaccaatttgaaaaaaggcacctacctgtatggaacagtgacaggctttggacagcagcgtgtcaaggctaccattaccagtattctggtcggtgataagtttatcaacgtgaagctttctgtgttcgataatgacggcatggaagggttctatgtaccggaatcttccttccgtgagttcgtgaaggatgccagctccagtgccgtgcagcaaaacatcaacttccaatcggaagatggctatggttccggtatctcaggtgaagccttggcgttgcaagccttgcaaaacgtctataactcagcttcttcggccatctcgtccaacatccgcaagaacaaggcgaaaatcaagtacaacacgattgtgtatctgattaactcggaggaagcaaggtaaaaggtcaagaataaatataggtaaactatcttactaatcacatagtaagtaaggttacaagtaatagagtaagcaagattacaaataacaaagtaagcaattcaaccaatcagtaaatcataaaaattacccaatatgaaagcgaaattatttttacttttcttcggtcttctaggttttgttgtacaggctgttgccaaggagaagatctacgtgaacagtgaggtcactacccatatcgtcatgcccgaaaacatcaagttggtggacatctctactaccaagattatgggcaatcagtgtgctgacaacatggtacgcatcaagccttatctggagcaagactccatcaaggcttcctttgacgagaatgagttgctgggcaccatcaccctgattggagagcgccatatcgctcagtatgatgtggtttatacccattatcccagcatggcagcctccatctttgaagtggcctacagcgatacccagtcctatatcaaccccgaagtgtcgatgcccaaggctgaaatggtacgctatgcgtgggcagtgtatggcagcaaacgcaagtacaatcaggtggtgtcgaatgcccacggtatgaaggccatcgtcaacaacatctataccatcggcgactacttctttattgattattccttacaaaacaagacgaagattgcctacgacattgaggaacttcgcgtgaagctgacggacaagaaagaaacgaaagccaccaactcgcagactattgaactgacaccggtttactcattgaaccccgtcaagaagttcaagaagaactaccggaatgtgctggtgattgagaagctgaccttcccggatgagaaggtgctccgactggaaatctcagagaaccaaatcagtggccgtgtcattacgctcaccattgaatatgaagacatcctcaatgccgatggctttgattcggacattctgaagaattcctcttgttatccttactattacatttaccgctagatctgacccgatatgaagaagattttaatgattatctgttgtgcgtttgccgtgctttcggcatccgcccaggacaagaaactcacgctgaatgccggttttctgttcccgaataccttgaatgcgatgattggttacgagcatccgttgagctatggcaatgccgtggaaatctatggtgaagtggggaatcattggcagaaacccacctgttgccgcttttggaaggggtactactgggatggcgggttggtctataagcagcgtttggtacgttacaagaacggcatgctccgcttccgtttgggtcctcagttcggtgccacccaaaagaaatttttcctcagtgtggaagccggctttgaatacagctatgtttttcagaacggctgggagttttcgctgatccagaagaacaacgtcaacttcctgcatggagataccttccgtaacggactcttactcggtgtgaagattcctttttagtattcactcaatctgatggcttatggcattcgaagaaacccgggaacagcaacagatgtacaactacttccgcagttgcatctatatctttctcatcatcgagattgtgatgaatcttcccattacggcggataaccgtgtgacgcagtttatcctggacctgttgggtagattcaaagtctttaattctgtatcaggctgcaaggtggcagagctaatctgtatctgtgtagtctgtatcggaaccaaggcaaagaaggcgttgaagttcaacgtgaagacgatggtcatctatccggtgctggctggattgacattggtcggcatgtgctttatctttcacggcatgaatatcggcatgagctggttcggctttccggccaaccgcatcctctatgcgctctgttcggtggtgggtaccatgctggtgcatcagggactggacggcatcgccaagtactacaactacaaggtgggcgaagaccgcttcaacttcgagaacgaatcgttccagcagtcggagactttggtagccaatgactattcggtgaatatcccgatgatttactactggaagcagaagatgcacaagggctggatcaacattatcaatccctttcgtgggacgattgtactgggtacaccgggttcgggtaagtcatttggtatcatcgatccgtttatccgtcagcatgctgccaagggatttgctattatgtgctacgattttaagttccctacattggccaagacacttttctatcagtattgcaagaataaaaaggcacaaagattaccaaaaaactgtggctttcacattatcaactttacggacgtggagtattcggaccgcatcaatccgattcagcgcaagtacattccggacctggcggcagcttcggaaacggctgctaccttgctggcttccctgaacaagggaggcggtgaaaagaaaggcggttcggaagctttttttaccaactcggcagagaactttctggcggccatcatctacttctttgtcaattttcatccggtcggattcaagaacggcaagaaactgaaacgctatatttcgttggcgaaagaaccggaagtacccaaggaggaaactacagctggtcaatcacaagaacagcaaccgtcttcttccaaagaaacaccctctgaacagcagtctgtggatgctttcaaggagcagactaattccaaggaggagttaccggagggaaataaattcgagctggtgatacgcaactgggacgattaccaagcaatagatgccaagaacaatgtcatcctggacttcgtggatgagaacggtaacgatgtatcaacggatgaagaccggatgttcgtggatttgaacggcttctcctacaaagaccggacagggaaactggtgaagattgagcgatgctggtatgaagatgaaaatggcaaggaggtagaaccggacaccatcaccggggagtattcggacatgccgcatgttctctcttttctgggaagaccctacgaccaggtgtttaacattctgatgcaggatgacaagattgcttccctcatggctcccttcaagagtgcctatgacaacaaggcgaacgaccagctggaaggtatggtgggtacgctgcgtgtcaatgccgcccgactggtatctcctgaagcctactgggtgtttacgggggatgacttcgacttgaagatttcggacaaggccaatccgagctatttggtgattgccaacgacccggagaaggaacaggtcatcggttcattgaatgcactggtgctgaaccgactgattacaagagtcaattccaagggaaacttcccggttagcatcatcgtggatgagctgcccacgctctacttccacaagatagaccgcttgattggtacggctcgctccaacaaggtagcggtgaccctgggctttcaagaactgccgcagctggaggcggactacggcaaggtggggatgcagaagattatcacgacctgcggcaacatcttcatgggtgcagcccgtaacaaggaaaccctggaatgggcgcagaatgatgtgttcggcaaggcgaagcagacttcccggtccatttctatcaacgacaacaaggtatcgaccaccatctccgagaagatggactacctggtgcctgccgccaagattgcggatatggcgaccggttggctggcgggtcaggctgcccgtgacttcacggctacggacgagcggatgctgaaccatttcgacatcgagcagtcggaagagttcaagactacgaagtacttctgcaagacgcacttcgatatgaagaaaattaagaatgaagaggaccactatgtgccgctaccgaaaatctacgagttcaagaatgaccgcgagaaggaaatcatgctgaatcgcaacttcaaacgggtgaacgatgaagtggagaaaatggtcaaggaactgctgggtatggcataaatgatttgtatatggcatccttacaatctgcatctgaacattctatcttattaccttcattgagtggtagtgcactgaaggtcatcgcccttgtttcaatggtggcagaccactgtgcttactacttaatggaacacggcacgcacctttacgagatcatgcgctgctttgggcgcatcgcttttccggtgttcgcctttctcattgcagagggcttccggcatacccgaaaccgaatgaagtacttcctgcagctgctgggatttgccgtaatcagtgaattgctctggtacctgctgaatggagcggatgggacgcacaatgtactcttcaccctggcattgggtgtaatggcactggcagcttttgaaacattaaaaaaggatggcatcctttgtggggctgtcatcctttctatagctggtttcgcttcctggtccggagtggactatgagtggcgagggattctgatgatgatggtattctacctattcgggaatgtcagcaatccttcttttccttcgggtagaaaggcgcatctattttgtgcctttctgctgatgatgtactatgggatagtcggtgctttgctggcttgcttaacaattgcctgttatgatggaacacgtggattcatccatggcaagatgacaaagtatggattctatgcgttctatccggtgcatttactcttgatacagctgctaaagtttctatttctctatttgtactgttgatttttctttccttagttccttattgatagtaggaataatacattcgttcagcatatgtttcaactcatcactgtccttggcatattgcccggaaatgtagtaaacttctttaatggctacatttctaaactccttaacagtgcttccttctggaatcattctttctttctgccaatagttaagtaccaaatcgaccatcgctgtgcgaagtagttttttagtgtctacggatagttttttgaaagatagttgttccaccatcccggtctcaccggggatgagtgggctgtcgttgacagtatcgtattgggagccatattgcatataattttcccacataccaaaatccttttccacttccacataggcaactccttgattattcttatgatgttttttctttgccataatatttccttctatgctgtttttgaatctgtatactttgtaatgactattgttgtaagtatttcaactctcacattcgttataagatattttcaatagtgcctgatgatttataaccatttttttacgattgcctctgtataatcccaaagttcctttgttttgctatgctgcgcataccgattagatagcgtacaaggatgacaactggcttgaagggtacctgtacaagaatcagcttcaacatccagcagcaagtggatggcagtagctgctccctggcggggagaacggataaaaggacggaagaaaatatcggtcaacggatcaaaccattgatgcatggtaatcatattagtagatacgataccgggatctgcagcatttactcggattcctcgttcttgtaagcggtgagccaaatcgaaggtaaacaaggtgagtgctaactttgtgttgctatatacgggaatgcgccaaaatcggcctttcttcccttgggtgaagaaatcgggaaagtccaggtgtccgatggcgtaggtacacgataccatgttgacaatgcggcttcctttctccatgcagggaagcaatttccgcgttagtagataaggagcgacatagtttacactaacagttcgttccagtccgtcttcagtcagatgacgtcctgtttccagtgtacctgcattgttcatcagcagagtgatacattcctgtcgtgttaacagttgttcggcagcttgagccaccgatttaagcgaggaaaaatcggcttccaatacttcaatggcagtgttgcctgtctcttctattaagatttggcgtgctttttccgcttcattccggtggtgacacatcattaccacccgaaaaccggccagagctacataccgagtgatttccatgcccattcctccgtcagctcccgtaatcacagctaattttccgtggcctttctgatgacatttcggctgaatacaattcttcatcttttattccttgtgttattcgatttgtcttttttctgattgggcttcgattctttcaatttccctctgcaggcaaggaggaagtttttcagacaggtgttggtgacaggccatatcaatggagtacatccgggcaatgcagtagttgctgtgcttgcatgctgagcgagcatcttcctcttttcgcatacggtttacaaaatcgggttcgttcaagagagcacgagccatctgcactgcctcgaagccatcattcagtacttcatcgattttttgccgcgacactaaaccgccgacgtaaaccaaaggcatatggagggctttccggaatttcagtgcatcttccagaaagtaggcttcttggaaaggcacagttggaatcatccatttgccaaccagtcgaacgccatatttgagccaccagcatttcatgtaatgactcatgcttcggatgggcatttcaccacgcattacatacatgggtgcccgactgacaaatcctccgctcaagaccaaggcatggactccagatccttccagacgtttggctacttgcagactttcttccagttccattccccctttgaaaccatcacgcatattcatttttacgaatacggctaaatcgtttcctgcggctttcatgacttcattcattaccatgtccatgaagcgcatccggttttccaaggaatctccgaactcgtctttgcgatgattggtagccggtgacaggaattggctaatcaagtagccgtgtccggcatgaatttccactgagtcgaagccggcttcccgggctagatttacggcacgtccgtaggcttgtgccagttggggcagttctgaggttcgcagggcgcggacaaacgtgggggaatataggttgaaaccaccggaagctcctacgggcaggcagccacagatatttttgtgcgacatgttgccgcagtgtcccagttgtatgccggcagctgctccttcggcatgaatggcatcagtcagccggcgcaagtcggagatgatttcaggacgcatccaaagttggcggtcgaacgacaagccgctttgggttactgctgcataggccacggtagtcataccgactcctcccgccgctaccgaacgatggtattgaagcaacatttctgaaggtcgatgtcccggacacatgctttcatacgcagcggagcgaatggtgcggttgcgcagcgtcagcggcccgatagtgattggtgtaaacaatttggatgtagtcatgatggcaagtttttatgtgttttgaagaattttatcagatggatattcagtagataaacggaatgattcgctttcgcttacctacagctaccgtgccaaattccttgcggtagtgttgatggatggcatgagctctgggtaccagattggcaaaagtccaccatacaaatacacctgctgctggagaaattgtcagcaacgcgaaaccaatccattctatgagttctcccaaataattggctgaagtgacatatttgaacattcctctggtaggcaaataatgacgagtgtcacctggttgccgtaaatttcgtatcacataatctgaatgaagattgatgcccattcctaagaaaaagagtagcattccaagaatggcatgtggtgagacaaaataatgccacccgcctgaataaaccgtatctgtaacgggtaaatagaacaggcctaaggcttgcataatgccgttcagtacattaaatacaactcccattcctacaatggtcaatggcatccgactcttgcctttcattagaaacggaaagatgaaggaacgttgaaaataatgtagttcaaagagtagaaaaaaatgagaacaggaatggaaaatggattttcacttgtaatccacaagtaaaacagaacgaaaaaaacaggggcttccatgagaacccaggctgttttattgggaatggatataccccatgatctcgtacggaaaacgccgtagcctgctttgacaaaatagagtgctacaaaaaccaataaggccagaaagctcatagcgattaaaaaacagttgaaaatttccatggttatcatcattcttagaaaagggttacacatgataaattcgaaagtacaaaaatattctgtaacacgaatgtttatgattgaattttatgattttggctatattttgtatggttgccggattgttttgactgggtattgaatctagtaaattgttatcgaaagaagtaaagcatatagtcttttgtataaggatataacgaaaaagagagcctgccgtttctcagcggcagactctcacggacagagttatttaaaagtagcttagaatttgtatcccaaagtaataccgatattggcattatgtggagcatttccgtccttcactttgcagaaaccgagctgggtatcgagaccgaccaaaattttgccgaattctacccctaatccgatgttccatccggcatcaaaacgattgtagtcaaggccgtcgctgccaaaagtgtcgactttgtctcctccattgactgcaatgccgccaatagaagctcctccgtcaaatttagtcttaccacctacaccgcaagcaaggtaaggaccggtcgcaatgaccagattggtgttgtctgcaaggttaaagcggaattgtacattgataggaagttccaaatagagttggttgatctttacgtctgcatcggcatcaacgacggttccttcatagccgctagagtatttggcccctttttgtgagaagaagagagaaggctgcagagaaataaggtctgtaaactggtattccatacctactccgatgcgtgctccgggcttgaatttggaatggtcggaattttcaccgatatagctgctcagattcagaccggcttttacctgaaaggagacttgtgcgaatccaatggtgctgcataacgcaaacaagatagttaaaatactttttttcataattatgttcattttaagtttcaatcaaaaagaagtcggacacttggtatgtccgaactttcacacacaatgtagcttccaagcggattagttttcatggatggtgcagatgcttacccgattccaatctggttcttcaaacatgtttcctacaccttgtccttcggctgtaatccggttctcggctattttataccgtttcactaacaaactcttgacggcatccgcacgttgttgggcgatacgggcatttacttcggcctttccttccggagaagcatatcctttgatggatacagtagccttttcatgatttttcaagtaagtcgcaatacgttccacattaggggtctgagacgctactacactgacacctccttggcggaaggttaccacagattccaaggtcttcttatggctggtgatggtatctgttacgataaccggaccctgattcttgcagtcggccaactgttgttccaattcagcatttcgttggttggcagcagtcagttcggcttcttgatctacgttggtttgtctcaggttatttacctgctcgttcagcgcatccacttctgcctggtcatacagcttggcaaaagaaatatgatgtttgccattgctgcaacggaagtggtatttcagaccggctgtaatttcccaagctgcccggttggcgttaaatcctacgtttcgttcaccacatgcgttcagatcatataccaaggcaggtttgatgccaatggtccaggctttggcttcacctaaattgaaattgaagttgagtcccagtttgctggagatgctgttacggtctccgttaccgttttgggcataatgcagccaaccgaggccggctacggtttctatttcgaataatcggggtgttccccaatatcctgcaaataggttgctcagattgacggaggtcaataaacttacattggtgttgtcaaatgccgttttgctggcagtcgtattgatgctggtcatggcttccacacccataccgaaaaagggtgtgagctgtttacctattccaagtccccatgtggctcgcatgttcgggaaaaatgcactgtgggtcaatggagtggtaacaccggcatggatgccaatagaccagttatctcccaagttggctccttcgtaagctctttgagcatagatgccactacaagtaagacaagctacaattactgcaataaatttcttcataagaatgagttgttaaaagtttagggctgcaatattagcagcatttacaatccgttgttattgaaagatcttttaattaacaaatattaaacataaatcaatacgaaaccaatcttttgactctctatgggatctattcataggggcactgggaaaatccgatgaagatatagctgaacatacggaagccataggtattcatttttggatggacagtatgaggcttcttcatggtatggcagtggttgattgtctcgtgtccttaattctataaagatatgctgtaggacatggaatcagatgaatttcagaatgtctgtctcctttttgataagttatgccacatttcccaagaaaaaagtttgaacctttatttttatttatacatttgcaagttgcataggtaaaacagcctgtttctaaaccttgtagtataataatgtatagtaatagtatagtttaatcaaaaattaagaaaacatgaaaaagtacattgctgaaatgttgggaacgatggttctcgttcttatgggatgtggcacggcggtcagtttgtcgtgtacgtcagctaaccctgatttagcttctactgttgttggtacggctcttgccttcggactggctgttgtggctatggcttacgctattggcggtatttccggctgtcatatcaatccggctattacactgggttgtttgttgtcgggacgtatcagtggaaaggatgccggtatgtatatgctgtttcaagtaatcggtgcctttatcggttcagctattttgtgggtgctgacttccaattccggactggttggcacgggagccaatgcttgtcaggaaggtgtttccgtaactggagctttgctggcggaaatagtttttacctttgtttttgtattggttgtattgggtacaacggatgctaagaaaggagcaggcaactttgcaggacttgctatcggtctttctttggtgctggttcatctcgcctgcattcgctatacgggaacttcggttaatccggcccgtagtatagctcctgccattttccaaggtggggaagctctaagtcagctgtggatattcatcatcggacttttcatcggtgctgcattaagtgccggagtgtggaaagtgtttgccgacaaacaagcctgatagaattgagtatttaaaaatagaatgaacggattagttacatttaaaattgaacgattatgaaattgaaaatgtattttataatgttggccttgggcctgttcagcttcgcaatgcaaagttgtgatgatgacgatgaggatgctcctgtttcagaacaactggagaaagcctttactaatgaatttggcaacgtagcccataattggtctacgcggggtactaatcatgttgcatctttcaatcaagacaatacagaaaaagaagcctggtttgatgcaaatggagtttggctgatgacagaaacggacattgcttatgatgctcttcctgcaccggttaaacaagcctttgaagcgcttactcaatatgagggttggcagcgtgacgatgtggatatgcttgagcgtaagggcatggagaaagtatatgtgattgaaatcgaaaaaggcaaggaggaattggacctctattttgatgtcaatggaaatctgttgaaggaagtagctgataaagacgatgattcgttcaactatttaccttctgaactccctgcatctgtagctcagttactgaatgagaagtatgctggttataagttgttggaggttgaactggatcctgtttccaaacttttggaagtggatgtccttttgcagtctgcccagttggaggtttgctttaacgttacagcatcttatgcgtgggtttctacttcgcaggatgtgttgtatatgtctttgcctgatgtagtaaagactgccgcacaaaataccgtaaaagaacatgtcggctatgaactggatgatgaagaagcggaaaaggtggttactcctacaggcacctattatatcgtagaattggaaatggaaggaaagcctgacattcaagttgaaattaaagaagacggtacactaaaacaataagattcatgtaatactcaattccaataaaagaagagagccttttgctgcattccagtaaaaggctctttcttgattatacaagtacggctaatttaaaagcgataagcaaatccaagattgaatacagcctgatcaaaatcactgaccagttgatagcggaactcaaagttcatcatccagtttctggctattgcgaaatcaactccaccaccaatattcatgccaaaccggcattcattgtcgctgtcgtcatcgccatttatatggacgtgatttccgtctatatccacatctaaatcattatcccagtcaaacatccaattggaaaatgtcagaccaagcaatgggtaaagctttactttacttgccacaggaaacaaatagtggaaattcaggtttacgtccaacatgctgacgttgtcattctcaaagaaatagttcaatgagggttccagacgtatggggttagtgatattgtactgatatttcagccccaaaccaacactctcaatttctgttccataacttaaaccgaatccgattgcttgttttcccttttgtgcataagtattgccaacaagcatcaaaaaacaaactgctaaaaataaagtctttttcattttggtatgtattttgtgtaaaattaatcatcgtcccagtcgtcatcatcgtcatcatcatcgtcgtcccatttatgacgcttgtatttcttgtattttttatgatggtatctgtcgtgatggtcacaataggaacaatagtgcttatgccaatatttgctatgaaaatcaatcctgtcataaaaaggattgtagtaatcgcttcccggtctgataccaatttcaatcaagacacgattccatttccgataacgtttataataatggcaaatgtcacgcatgtgtttgccggaagtccttgctatttcaagggctaaaccgacattaccccagtcgcgtccacattgtctgtaatagtcatccagaagactgccgcgcgtgttatactccacgcacaatcgtttccggtagtcggacagttccacagaggcatatttattagctctgctgatgaacaaggatagcctgtcttgtgcaaagatggaacaagaaacggccatgagcaatagtaaagtataaaatttcctcataaaacaaatgattggtaaaattgtggacaaaggtactataaaatcattagataatgcattgcatttgaaaaaatacaatcatttgttgattttttcgtcaaaaagatgtttcaaagcagatttttgacaggaatgatgggtgaaattagccaagcagtgcttttttataagaacggatagctgatttctaattctatttgttacctttgagaatcattgtaaaatatggcttatgggaaccttgggatgcatcaatgacatgttgcaacgcgataaagaaaatcgagagttgcgcaaacggaatcgggagaggctaacagacacctaccaccggttattggatacaggaaaagagactgacctctctcagatgacggtggaaaagatggaagacatccgccggaaaacgttggaaaaagaagaactggataaggctgcccattttaagacgatgctttatttagctttggggatggcattgattcttctcttggtatggttacttatgggatgtagcggtaaaccgttcggaaacaatcagtctacaataaagagtgattcagctttgattacacaaggtgctcaaacagtctccgttcatacccaagatacaatctgccatcttcctgtagctactcagagtgtaaaggattctgtgtttacagagcaagaactgcaaaagatacagaatgaactacgagaacgatatgcgcgttcagaaataaaaggtacccgattggacggcaatataatgggatggggtataaatggcaatcatcttgtcgtatatttatgtctaaactctctggaagccagagccgttttccgtaagaaggtcatggattcacccgctatccgttttgaaggaccattggaactgtctcctaacaacaaacgatacacttccgataccttgggcatccatttatatcctgaattttctgcatacccatacacggctcataccgccacttttgtactattcaatcagagcgaccatgagatccagtttggagaagattaccaaattacctatgaagataaacaaggagtatggcgagaacttcccatacatacggtattcaacgacattctctattttatcggaccaggcaaacgatttctgtttaaagcagacctcaacccgaatgttctgcccaaccgacctggcagataccgattcttttataaggtgagactggctaacaagaatcaggaaatcacgcttatgaccgaattccggttggcagacatcaaagaagctgtccgtgattcttccgatgtaatcagcgtggaatatgtaaattacccccgataaacgttgatgtaaaacatcttacgaatatggtatattttcgaaagaactttgttttcataaattgttttgcctatgagaatcagtattgtatttttgattgccttttgccttttatttcactcttgtcatttcggtttttccaagaaaagactcggagataaaacagatagcattcagttgcaaaaggaattatgctctatacagcaacgtatagacggcattcttcaatctaacactaccctgcaacagcgttttcattgtttgggggctgtattgggtgcggagaaagtttctatttactttcaaaatataccggtagattcttttgaggtttttaaatcggcatttaaaaaagatatttttgattctccgttattggaatttgatattctgacttttatgcatgatattgatattgaaatcatttcaacagatgaagactctttcgaacagactgtaaatagaaaactgaatccgatgctgtagcccatccattatccgtctttcgtcaaaatacgtatctttaccgaaaaaatattcctatgcagcctatgagaacgcgaatatcattttatcgtacagtcttatcagcacttccgtcaatcgtgttgatgcttgccatcggacttttatgggtcggatgtcagcataagtcaattgcaatccaccgtgaaaacggttggtatcctgtaacgggcgactccaatgacagtctttctttggagcctatcgttacgacgaaagatttcagtgttttacgattagattcggatgcctttggcaaatacgtaatttttggacagatacatccgtattatatgaacctatgggcggaagaaacagaaaaagccattggaaaacagattgcttttgtgtttaatgattcagtgataagcaaccccactgtaaatatgagaattgagagtggaaattttgccataacctcttattgtgacactttactgccgggaatttatgaggaactgaataaggaaatcaatccttcttactcggacagtttaacaagacttgctactgcccgattatggaaggaagcgagagaatttaaaaagacgctgacggatacgacctttttgaaaaccaaggggatgatgtcttatgccgctatagatgtaatgaatgccaacggatttaatccgcattatgcctataatcaagttgtttatctcaaagccttgggtagagccagaaagaaaatatccataaagaacggacatgtgattttcccctgtcaacgtggtaaagacctgaatatatcagatgacttatttctgtttatacaatccttatttaaagagtggaatcaatggttggataccggcaagtatcagctagtcaaagatgaagatggtttgtatactgttgagccacttcctgaaaagaaggataagccggtctctgtttctcttccttccaccaaatctgagaaacaacctataacggaagaaccagttgaccaaagaaccggtcagcaagtaatagaggctttaagtaaagcatatggtacggactcaacagtaatcggtgatttcttggacagtccgcactgtcctgcattcttggaaggaatgttttttgatggttctacactggtcttccaagtgagaggagataccactgtagcacggcacacactggaagcagccgcaaaaagcggtgctttccggctggagcctgctacggctgaaagttttacccaaaagcagctgaaagagattctgaatattatcgatagtaaaagagataaacttacagatgaatgcctgaagtccaatttgatgtcttggggtatgggtagccattatattcacgtaacttttatcttgaacactccagaagcccgaaaggctttccgggaaaagattatcgattcaccggcggtcatttttgaaggactcactgaaaaagcccccaacaatagtatgggtgtcagtgatactttgggcattctgctgcaatctgactatccggtctattccactcaaagtaaacgagccacttttgttttagtcaatcacagccaagtaacattagaatccggtgaatcttattacatcacttatgaagacggacaaggcgtatggcgggacttgcctattcataccatatttaatagtgttgcctatatcattggaccgggaaaaaacaaacatttatccggttctttgtatccggaaatacatcacaacaagccgggaagataccgtttcttctatcctgttacttttacagacaccggaagaaacattactctgatggcggaattcaagctgacagacaatccaaaagaattggcagaaggacagaaagaaaagagacctgccgtaccctctacccaagataaccggccagttggagctataacaacgtctgtgccggaagttccgacagatgataatcacctttttttagtagtagaatgcatgcccgaatttcccggagggatgcaaggttgtctggatttcatacagaaagaaatgcactatcctgaagaagccaaaaatgcaggcattcaaggacggatagtcttgcaattcatcatcgagaaagacggcacgcccgcccagcctcggattgtacgtagcgttcaccccttgttggataaagaagccttgcgaattatccgacaaatgccgaagtggacaccgggaaaacaagatgggaagccccaacgggtcctttataccataccaattcagtttcggttgcctaagtcatgagccattgtttgatttaaattccatatacacatgaaacgcttttttctatccttcatactgcttgggtgcttctttcaacttgaagcacaagaaagaacagccaacgacaccattctgatgttggaaaacaaatcattgaatgatgttcgcgattataattggctcatcaaaacactgagcagagagtgtaaatatccagttgcccagcaaaaaaggaacaagggttgtgttttacaggtggaatatactgtgactccggaaggctatatcagccatgctacggtactcaaccaagcaccccgtgcattccgaaagtcggtgatgcaagtttttcaatcgctacggaacgtacccactgtcttacgccccgggaaaagcactctcagcatccaattctggctggataacatgacgaaaggccctcacgcagatgttttgataatcggctacagttcttgtaatacccctgtcctgatgcgatatgatgccgtgctgactgcccatactacagaacctcatctagaagtgggggtaccggtatgttatctgaatgaacgaggcgataccattgtgccttacgggaaatatcggtattgtcagacggatactatcacggaaataggctttgtgtatgagaaccaaccgaagaaatcccgtattgtttgcatcaatgatgcaggcaaagaactattttacgtttttaaatgcgataatggaccggattatctgaaagaaggactattccggatgatggatgaacaagaacggataggctttgccgattcatcaggcaatgtggttatccacccccaatatctgtatgccactccgtttgcgaacggttatgcctatgtaaccgaacatggaggggagagcaacgagagggagcacacgacctggcagtcggatgaatggaaaatcattaaccggaacggcaacaaattgctggaatacaccgtcatccgggaagacaaaaacgtcaaaggattgtttatccaatattcccatccatctggaagcatccggccccttacctatacctatccggaagatattgctctcgcggacaattttcacgcagaggtgacgcttaaagacttgaactttgacggacaggatgacattgctataccgttaggtaactatggaaatcaacgcattcaatatgaagacggttatttgtgggataagacacaaaagacctatgtccccgtcaagcagctgaaggaaattgccaatccgcggattgacaaagaagagcggtgtctgttctccttttcccgtgaatcggcagccagctaccattatgagcgatttgaatatgtggacgctgagcttgtcaagaccgccgaactcatccagacttaccgtcaggcaggaggaaagtctctcttcaccgagaagcattatcagaaagggaaaggtatgagggtagttcattcatcggttcctatccgcgaaatttctcattattggttgaagattgtgcaaaaatgaactttgggcagcatcaactaagggaatgttttgtatttttgctcaataaaacctttattcatcctattttaaagaggaggacggattatgaaagttacggttgtcggcatgttatgctgtttgctgtctcttgcttgcacggataagcagaagacatttttgccggaagcggttcccgcctcggctattgccgttatcggaggttcagagcaggatacgactgcattgacggtagaggggaataaagccattgccccacagatacaagacagggatacggtcatttatgaaatgccctcgtattatctgtggtatagaaaagatttgccgaaatcttatcgtaagcaggaacatcagttttggacagagcgtaaggtgtattggcaagatgtgaaggtcatcaatgtctttctggccaattacacggatgtacctcttgaatttaacggagattgggagcttcagcaatggaatggtcaagattgggaacagccgcaattgaagcatttgcccgatacagcagagacagagtggataaacgatgaacaagcccattgcttgtattgctttcgcattcccgtaggtgacttttattatttgccgaagggacgttatcggataaataagctggttgctccccataatcagcacgtcgtttgtctgtctgccccatttgaaattccctaaaatcggttcgtaaaaagataacagtttgaactaaaatcaagtatttgcgtatgaaaaagtatggattaattttcatcatgagcctactggtttgtgttacgatgaaagcgcaggagtgtgagcggtatatcgaagtgaccggaacgtctgaaatggaggtcgtaccggatgagattcattatctcattgaaatacaggagtattttgaggaggaatttgatggcatatcgaagtctgagcaatacaagacgaaggtacctattacccggattgagcaggaattgatgcaggctatccatgatgccggaatccccgactcagctgtacgcgttcaagaatatggcaacaattggcgacatcaggggcatgattttttgatctcgaaacagctggacatcaccctgcaggacttcaagcagattgaccggattgtccaaaagcttaacacccggggcattcactcgatgcgtatcggcaagttggataacaaggatatactgacctaccaccaaaaggccaagattgaagccctgaaagctgcccaacgcaaagcagcttatctggtagaagctttggataagaaattgggttcggtgatacgcatcgtagaaaataccaatgcaaactcaggaatgttcggtgctttacaaagcaacgtgatgtcgatgaatgccggaggatatgataacttccgtaccatccaactgaaatattcgatgacggtacgctttgaaataacggactggatgagtcgttgattctatcacgtcaatttgcccgtctgatgagctgacaagcgttttttatcgaatgtatctgacgaaaataaaaaagaaatgcttaccttgcgccgtgcagtctctgaaggctgtacggcaaataaaatactaaccttaaaagagaagattatgaacatttttttgaaagcggtgcaacgcatcaacccttcgcaccccgatgaacccaagaagtggtacctcgtgcaatataccactaagatggtggacgaaagtgaagttgcccgaccctagattgccgagttgggcgactcagcaaactgagttggaggcaacctttggaaaaagaaactcaaggcgaaatcaaaacggagtcaatcgttggaatgcttctcttcttgccgcttttcttcttgctctttctctgcctgcatctgctgtcgctcttttttctgaatcatactcataaaggaggaactaatgataccggtaggaatcgctaccatggctacaccgaacagacagatgatgcatcccaataatttgcccaatggagtgatgggataaatatcaccataacctaccgttgcaaaggtgatgatggcccaccaaatgccgtcaccgatgttttcaaacacatcgggttgggcgttccgctcgatgtaatacatgaggatggccgagaaacagatagtaatgaaactggctgtataggccgtagcaagttcctctctgacggaatacaaagccttgccaatcagtcggaaggagcgggaatggcgtatcagcttgaatatgatgaaaatataagggaggataatgatgtgtactacttctgtgttccaatagatagggatattcctaaaataataaaatttaaggcaactacttcattgcgaattagttgccttttttgtatctttaagcattccccccaaaaaacggtttgacggccaaaacgggggtaatctaaaataaaaacacatggtaaagatacaaaaaatctcagaaatcgaaccttgtttaggttttaccgagttcgatatgcttaaaaaatatcgtcaaagttttgcaacgagtgaattaggtcgactccattctctattccctttctcggaactggcccgacaaatgcatttgaagtcctctgctttgggtcgtaaaagttatttttctcccgaaggtaaaatagccttgatggtcttgaagtcctataccaacttttccgatgcacaactgattgagcatttaaacggtaatattcattaccagttgttttgtggtgtccagattgatccgcttcatccactaaccaatcctaaaatcgttagtgcaattcgtcaggaactagcgaatcgccttgatgttgagtccctccagttcattcttgccgagcattggaaaccttatcttgagaaccttcatgtctgtatgaccgatgccacctgttatgaaagtcacctgcgttttcctactgatgccaaactcttatgggaaggtattgtatggcttcatcgtcatctgtgcaaacattgccgtacattgcacatacaacgtccccgtaacaagtatcttgatgtacgccgtgcctatcttgcttatagcaaactgcgtaaacgcaggaaatcacagactcgtatgattacacgaaggttacttcaattattggaaaagttacttgaccagctggagcagcttcattcatcctacaggaacaggcttgcactatcctctgattaccaaagacgtttctcggtcatacagacagtccttgagcaagggaagaatttatttgcaggcaaaaaagtgtccaaccgtatcgtgagtatcgaccggcattaccttcgccccattatcagaggcaaggaaaccaaatccgttgaattcggagccaaagtcaacaatatacagatagacggaatctcctttatagaacatatctcctttaaggcttttaacgaaggagtacgtttgaaagactgtattcatctgcaacaacaactgaccggggttagggttaaggcgcttgcggcggattcaatctatgccaataatgccaaccggaaattttgtacaaaatatcatataagtacttcctttaagcgtaagggcagagctgccaaagatgagccgcttcggagaatcttacggtcggaactcagccgcgaaagagctacccgcctggaaggaagttttggaacgcagaaacaacattactcactggccaggataaaagctagaaacaggaaaacggaagtactttggattttctttgggatacatacagccaatgcggtatgtatgatagaaaaggtcgaaaagaaaaaaagaaaggcagcataatctgactaaaataacaggaaaaacaggagaggttttaacttcccctaaaaaagacatgtacataatgcatgggtgggaaggaaaaaacaagaatatgtaaacaatattctacaaaaaagatagaagactgggagagttgaacgaaaaaatcaagagaaaagctttgctttacgtgagcttttctcttgattttttagaaagaggaacatttactgaatatccctagatataggtcagcacacaaggtaggatggctacaaaatccacaaatccgtagaaagagagtgtataaagcaaacgtgccttaatagcactttttgttggatgaagggctggcgcggacaagatacgggctgaatattcgagcaggaatacgaacgaagaaatataggtgatgccgaataaggataaccgataccgggacatctcttcaaaagaactggcaatgactgccagaatggaaatcaagatgaagaagagtacaatataatgcacccagttcttgttcagaaaacgttggatagctacatataatttcatgatacgacaaacttggattggaaaaacaataggaaaatgtctgctgagataccttttcaacgggctgtaatttttttgcttgtcggcaaccggtacttagctaaaacaaggctcttttctccatgatatgggaaaccggagaaaagtagccttgtctgtcatcatcactatgtcattggaaaatataggaatcagttctttcttttggccagttcgagcacctgcacactgcctgcagcaaacagtcccacgtgtccgttgggtaacatgccgaaagtggttacttccttcagagcggctaatacctcaaattcggtttcgatgtttgggcaagtcatacgtgtgctggaaataggcaggaacaccaatgaattggatggtttctcaagggtcttgaacttaccgttcatctggttgcatccggcatttccactaagtgtcttttccgttatgtcgagtgagaagaaggggcggttctccatggaatccggcaaaacttcgccgttcactttcaccacgtcccatataccctgcaaatcagacagcggcatcatgaaacagcgtctgttcaatttggccaatggttgattgagcgaatcacacagcagaatctgatcggtgtctccccgttttactttctttgtcagggaaagtgcgtgtgaaagtgccttttcctgctccatatccggacatgccatcatcgtggaagccagcttatccatcaccatctgggctgactcgtccgaccattcaaacgaacccatcagacggttgcagcctccatatccatacaccctcatctcacgggtgtcaaaaccgatgaaaggctgttgtttcgtattcaccgactgacctgccagttctacaacattccattccccttcaaggtcagacaaggataccggatttccatttcccatacaagatgccaacgcaaacagggctgtcaacatcccataaatcattgttttattcatttttctcatacgtttaattatcaaatcaggtgttgaaggctatctatatgctactgcggagcgccttctgctccctgggcttatttcctaaatcagacgcaaaggtagcaaaccttgtgatacggatgtatcttttaggcaaaaaatgcaaagccgagcggcatattattattccttttataacctatccgttgtgtggagtacggaagtaagccgtatcatgccttcaaccgcagcgtaaagcaactgttctcccaaaagtttttcaaggaagagttcagataatctattttttgtgttactttgcacactctattgtaggtcgggagtatacattttccgaccgatactctatatatcttcacagaggctacaatcgtaagtagtctctgtttctttttaaagttgaatgcatgttgtattccactctacgattttcccatttttttagaattctgattacttcacgcacatacctcggatcttccgcgtagccaatcttgtgcagccacagcaggtagtttcctcctttatacttatactgcaccttggtatagtaggcccggacgctttccgtccagtggttgaactcatagtatttcccggttttgggattcgtcagtccaaacaggttgtgccggttccgacagagcggtgaacggaaccagcccgtttccagtatggcttgtgccagtactatcttcggatgccggatgccattgcggatgatttcccggtagagattaggaatggtgagtgcaggaagtgcttttttcacacaaaccgtagttccttcagttcccttatcagacgctttttcgtgggacacccttgcgtaaacttttcgggcatatagctccgaaagcggtttcataggcacctctggggcaagtgagtccttttctgcctttttgcaagactcaaaagcgtccaaacccctctgtagggtatcaggaaccactttttgttgcttttcaggtaggatttccgtctctttcgtaattgtatagaactgtgccgatgccgaaacggaaccaagaatcagcaacgcggcgcaaagaatgatgttgtgcatttcttttcaatgatagggttgacaatacttttgcgggtgttcaaggcggttccgaccgcaaatatatcgttttacttaaacaatacgaaaatgcacaacatcaatcattctgaaaggctgccctacgagaagttggcggcattgggcattgaccgggaaaaggccgacagtctccctcaggaagtgaaggagaagctggcatccggagaggtcaccccgctcatgcaggtgtccatcagtgcccgtaacggagacatcatcacgcttcccctcaaacttcaactgaccaccgaccagcaaggtaatccggcgctcatggcttatcctgtccgtgccgtactggagaaggaacgcaaccaggtgttgcgcctcacggaacaggaagccgaaaggctcaacaagggtgaggtcatccagaaagccgtggaagtcaacggcgagaagactcagcagtatctgcaactcgatcccgaaaccaaatccgtcattcatcgccgagttacggacgttcagctggaacagaaactcaaggacatggaaaaggtcaacgacatcgaactgggcatgcagcagaagcagcaggtacgcgagggaaaacccattgagctgaatgtaggtggcgagaaagtgtcggtcggtgtggatttgaaagaaccccagggtttcaaggtcatccaaggtgatatgaaggaatgggaacggcagcagaaactccgctacgatgagcagcatcccgaatacctgggactggtgatgacggacaagaaccgctgggaataccagcaggtggtggacaagcagtcgcaggagagagccttgaaacttcgtgcaccgaaagctgaacaatccaaaggtctcaaactctaaatccttttccctatggtcaagaagaatgcagagaaggatgtcggctttgtccggcagttcaacgaattgaagaagaaacatcccgatgcggtgctgctcttccgtaagggtgacttctacgaaatgtacaaggaagatgctctcaaggcatcggtgatactggcgctgaaggtatcagacaagattctgccgctggagaatgaccccatcaaactcctgacctttccccgtcatgaactggacaaacatctgcccaagctgattcgctccggtcagcgggtcgccatctgcgaggcgatagaccgtccggaactgatgaagaaacccaaggaaaagaccggggaagatttgaaagaaacgaacatctctaacaagaatactatggcgaaaaagaagaaagaacaggctgtgcaggaagagccaaccaaaacagtcaagacggctgcagaggagaaacctgccaaggaaaagaagacggaagccaaagccgaagtcaagagtgaacaacaggccgagcagaaagcggaagccaagcaggaacgcaaaccacgcgaaccgcagatgattaccgccaacggcgagaaagtcagtcacggccatgcgttccagagtaccaccaatccggcggactggtacttcaccgccaagatggacggcgtgcagctgaagccgcagaaaatggacgcagcggatttggccgcttaccagaagaaggaaatgacagtgccgcagttgatggagaagtattatccgactaaactcatgccgaaggtttcggatgaagcgttccaaatgccgaagcagttatccagtccggacggagccattaccatcgacaagttcaatgtctataaggaaaaggacgagcagcgaccggattacggcaaatataagttctatgtacagatgggcgataccaagatgtcggcagtggcttcccgtgaggacctgaatgcctacttcgaccgcgtggtcagtcctacacaacttgtggagaagaacttcggggagcgtctgcacctgcagtcagcctacgagaagtaccagcttcccgaaggagtagaccccaaaggagtccgcgtggccaaggaccactccgacaacaaatggaaggtgtcgatggacctgggcgacaagggcaagaccagcaagcatgaactctccttcgatgacggttactcgctcttcaaggcaaagactgccacccgggaacagattgcggccaagtacctcaatacggaaatcacgggcatgctttcagccgtgaccaacaaactggagaagtcggcttccatgaaaatgtaacacaatcaaaagaaacaaacgaatattcaagaaacaataaaagacgaaaagatatgacagctaaaaagacacacgaggagttggtggaactccttcagaccggtaaaatcggcttcctccgctttgtgatggacggggacagtgcagaggattatttggaatggtgccagacccacggcacggatccttcggatgaatccgcagagttttatgttgaacagacggacattgaccagatggaccgtcaggtaatggatgacgaaagctatggcgtatggaactaacacatccggcaatgccgggcaggtagccatcgaccgctttgccgaaatgatgatagcccgcatggagcagatgaaggcttccgactggaagaaaggctggattgggggtgcatccggatttgcaggtctcccgcagaacgtgggaggccgcaactattcaggttccaattccttcttcctccagctgcagaccgcagcccagggttaccggctgccggtgtacctcaccttcaagcaggcgcacaacctcaaggcccatgtactgaaaggtgaaaaagccttccctgtggtctattgggacgtgctggtcaaggacaagaacggccataaggtcagttcggatgagtataaggccatgagcaaggaggagaagaaaggcatggatgtcattcccttcttcaaggctttccccgtgtacaacatcgaccagaccaacctggcagaagtgcagcccgaacgggtgcagaaactcatggagaagttcaaggtgcccgagctccgggataaggaaggcatgtatgtccatgccgccctcgaccggatgattgagacgcaaggctggctctgccccatacaggcagacaaacgggtggacggagctttctattcaccggctaaagacatcgtggtgctgcccatgaaggagcagttcaacatcggcaatacccccgaggaagtctaccggggcggcatggagttctattccaccatgctgcatgagatgtcacactccaccatgactcctgaacggctcaaccgcgagatgggcgggcgcttcggagacccgaaatacgcaaaagaagaattggtggcggaactgacggctgccatgatctgccattcgatgggatttgacatgaaggtgacggacaactccgcagcctatctggattcctggattggggtgctgaagcaggaaccgaagttcatcgtttccgtcatggcggacgtgaacaaggcttcggacctgattctggaccaggtggacaaacagcggctggcactgaacgagcagccctatctgacgaagaacgacccgtttgccccgttggacgaaggcgaagaagtgccgttcaagaatgcggccatcgtgaagacacgcaacggggattatgccatccgcgcttcgtatgacggtgtggaactggggttgaagaaggtatcgaaagatacggccaagacctacttccagctgacggactacaaggacaaggctgccttcctgaacatgacagcgcacaagactttcgagccggaagtggccaacctcaagcgcacgcaggcagtgggagcgaaaatgagtttctaatcataccttcaaatccatgaaccatgactgattacaaggtaaacttcaaggacctcaaagccaaggttggcatcgacgatgtagcctatgcgctcggctaccgtctggaccgaaaggccggtgtgggccgctacatggagctggtgttgggtgatggcaaggaaaagcgggatgcgctcgtaatctgccacccccaggacaaggcttcccagcggttcttccgccgtgacggttccaagggggatgtagtcacactcatccgggagaacctgaatgccttcaacgtgtcgggcaaggatgaatggcagaagatagccaaggtgctgtcccgctttgccaacatgcccgaacccgaataccgcgaggaccgggagtatgtgcagtcagtcaggtatcatgccaccttcgacagctccaggtatgaggtgaagccgataaatcccgataaggttccggccatcttccaacaaaggggattgtctgatgaaacggtacgcacctttgctccgttcatccggctcatccgcgacaggaagaacgagaactttgacggctacaacatcggcttcccttatatcaacggagagaacgacaaggtccggggttacgaaatgcgagggtacggcggttacaaatccaaggctgccggaagtgattccagttcttccgcatgggtggccgacttgtcaggaggctatccgaatgtggtgaagagtgtcttcttctgtgagtcggctttcgatgccatggcattctaccaatggaaccggaagcagctgaccaatgaaattgccctggtatcactgggcggcacgttctctgacggacaaatccggcaggtgctgaaccgctttcccggagctcgcccgtttgactgtttcgacaatgacctgcccggtcgtatctacggcttgcgcatgatggcgctggtagagaacatccccttgaaaatcaaccgaacccgtgacaacttggaagtggaagcgaacggacgttccttccggcttgatccggagcgaccctttcaggtgcaggtcaaggaacacctgtcggtcagatacgatatgggacaatggcttcctcccaaggcattcaaggactggaacgactgtctgctcaacaaaccgatggaggtgcggctgcatccgaccaaacaggaccaaatcaataacctggccgaacgcagaaatgcaggccctaaattataaacgtatgaatgtaagacgatggaaacgctccttgttaatagcagctgttggcttattgataggcaagactccgctctttgcccaacagaccgacccggcgctgacttctgccgtactgggtcagaccgcagccttgaagaagattcacaaggaccgcaagaaaacgcaggagaaaatcattgcagcggaagtggcagtaaccgcttcactggagcggattcaccatgtggaagacaagatgctggactacctttcgaatgcgcagggcgccatgcagaacctctaccagattaagcgggctggggaactggtggccaaggaaatcccgcagaactgcagcctgctcctcaaatcggtgggcggcaatctgaagggaaccgttattgcggccatggtatcggatgaactgacggatgctgccacacagatgacggcactctttcccttcatgaagcagctggtaacttcgggcaagtatgacgtgacaggagatgacggaaagaacgagaagcacaaggtgaacctgctgaacgcttcggaacgctactacatcgccaacgaggtggtcagccgtttggaagccatcaacaccgacctgtttatcctggcctggcaggtacgcacactctcatggaacgacctctggttttcgcttgatcccgaaggatgggccaacgtgatgtccggcaagaacatcatcggcggtatcatctcggactggaaccagggctacagtctgaaatggtaaatagataaacaagtaaactaatttactaatcacaaagtaatcaagtaaggaaataagaaagtaatcaaagcaataagtaacagaatcatatagtaaacaaatcatccaaaaacaaaagcgtatggaaaagaaaataatcggtcgctgtcccttatgtggcggcaacgtggtaaagacctgcaagggctaccgctgtgagaacaatatcgccgaacagcctacctgtgtgctgaatatcaacggcattatcggcaaccgcaagatgagtgacgaggaaatcaccgaactgttggagcgccgcttcatcctgttggacggctttgcttccaaggagggaaaggcattcccttccgtgctggaactggcagacaacggtgccatcaacatgcagtccgtcatcggcaaatgtccgcattgcggcggtgatattcgggtgggtacacgcgccttcaactgctccaattacagcaaccagcaagcgccgtgcaacttcgccatctggcgcaacatcggtggtcaccagctgagtttgacagaagccaaggaaatctgtgaaaaagaaatcacctccaacgaactggagatgtaccgcgacgacggcaccatctaccgcaagcgtctcggtctttctcccgataaactccaaattgtgaagatatgaaaccgggaatgaaactcactattctgctggtgaccgccgtctgcttctggagcgggctgttttacttcgccagctgttccgaccatcccgagaagcgggcggtggaaatcgcagagagggccctgaaggcaaccatcgataatccggagtccatccaaatcaagggcatcagtaaggcagattcggtattcggcaaggaatatgtcaatccgcatgagaaggctgcactttccatgcacctgatgcagtacggccacaagttgatggaagaaacagactacttccagaacatcgacaaggacgatgccgcaatgagtgatcaggtcacccgtcagctggatgccatgaccacgctccgggctttgatagcttatggagaaatggaagaagcaaaagccgggaaagaaaaggtcgcgaagccgtttaacggatggaaggtcaagatagattttgaagccaagaccttaaaaggaaaaccttttcactcggaatactggttcatcctcgataaggaggcggaaattgtagttaagtcatttgaaataccgctgctatgaaaccgagaaacttgaaacatttactgtgcgctatactcacaggaggaaccatgttatttacctcctgcgaagaatgtaaccatgaaggagacaggtctatcgcttcttccctccaggttggtgatgtagtctgctcggatggcagtgtgctgtctaaagaaaagttcagttccttcaagaaagagccggtggccattgtctatcatgtgaaccggaatccggagatcaaagctttgggctatgccgtttccatccgggatgtcgcacctaaagcctttactgacagtctgggtgtcgaacaggaaacgtcagcttcattggagaaggaagacggcaacgagaacacccatgccatgtaccgccacgaggaagtgaaatctcccttagccgtttatgtcttcgacatgtggcgctacggccagtctgcctacattccttcggtgaagcagctcacttacctctatcagcagattggactagtcaaccaacggatagagtcggtaggtggattacccatcagtctgcagcccggtgactgctggctgtggacttccaccgaagtggagggacaaagggacagcaaggcttggctcttctcgatgcagtcgggaaccattcaggaaactccgaaggaccaggcacataagttcagacccgtgataagtatctattagatagtgtaacctctaaacgcaaagattatgaatgaattactcgtacaactccagatgaagatggaggcattccaaaaggatgcaacccttcaagcagaaaaaggaaacaaggcagccggccaacgtgcccgctgtgtctcacttgaaatggaaccgctactgaagcagttcaggaaattgtcgttggcggcttcgaaaagataaaatcaaaaactttacgtggttgccattcataggcaatgaaaaaacaagaggtcctgatgccattcatccatgcgcatcaggacttttttgttgcatcagtaaaccatgcctttctgtctcatttcttcccgaataagttctgcttcggtatgggtcagctggggaagctgtacctgttccggactctcttgctggtaagccttcacttcgttgatgagcatttgccagtcgtaaaggaactcctgactgcagccgtgtttctgataaatctttttggcggcttccagtatctctccggcacagctgtcattcccctggaatacaactgccggaatctcgttgtggaagcaatctctcaataagcgtatctgatctttcatttgtgtaaggtaataaaatctgttttatatcgtgcctttctgaacatttattttcagggtctgcaaagatagtgagttttcggatagattaaaagttaaacattcatctttaacagctggcggattctttccttagtcaggcatttccactcccgatgaattttccgatacaaagaaacgaagggtcggtacggcagcaaatggcgctttgcttggctgcaaggaaagcagccggcagccttccgcaatttgtgccaaattgggtattccgtctgctttccccttgccacatttgccttctgtccctttcacccttcgtgagaagaggtatcgtaaaaatcacccgggagtgagaagccgaaaggcttcaaaccaaaggggaaaaattagttcagctatggcatacaaacttaaagaccgaaaagaaaagatgctctacaagggcagtgtttacgaacttaccctgcagtgggacagagagagtctccgcaagtgcttttgcggtatgcctcctttctatgcacacatccggaaggacggcaacaacttcgcactcattgactgctattccaccggggacgatttcagtgtggaacccatgcatccgctttttgaagagccggaatggatagttcacttcttaaagtcggacatcaactccattccactaaagaaactgctggaactgcttcccatctaattcacggagtaacgaacttaaaaagaaaacgctatggacacacttattgaagccatcccgacatgggcactctgctatctgttcaactcggatgcaaccggactgacggatgaagaaatcgctctgattgaccagtggtacacggagaacaaggtcatgggtatcactaccgcaacgaaacaagagggagagtgtttcccttacttctcacactatccggctttcggacttcctgccgaagtggtggactgccacgttatggtaggctgattgccgagagcattagaataatcaaatcttttacgcttaaacataggaacatatgaaaggaactgaccatttcaaggaactcatcaagaactatcttgataaccgagccaaggaagataaactcttccgtgccaagtatgaaaccactacacgcaccattgacgatgtggtcaactatatcttccatgccgtacagcaatccggctgctgcggtttcagcgatttggaggtttatgctatggcagtccatgcgatagatgaacctcatttggaaatcggtaagctgatgaactgcaatgtggtagtgaatcatcacattgagctgactgaggctgagaaggcagaacagcgagccattgccctcaaacgataccaggaggaggaaatgcggaagctgcagcaacgcaacagccgacccaaggcagccaaaccgcaacccaaacccattcaagaattctcactctttcaaggcatggaactatgaaggcaagaacgaaaatagaaaaacaggtggcagcttccaatgagaagctgaccgtcctaagccccaaagtgctcacatgggcagtgcggaaagtggcaggacatgtctgcttccggacttccgcacacaagtgtacctgtggcgattgtggcaggcacttcgactatgagggaaaaggaaagtcggtatgctgcccttattgcggtactcgcttacagataaaggataccctcaaacgcaccatcaaggaagcatactacttctcttccctcgaagtaatagaccatttgcaggtgcaacgagtcttccgtttggaaacgaccttccggaaaggattgcctatagaggtagactactgggaggtatgccgtctgtggctcaatgccgaaggcaagttggctgtcacagcaagaacaaggacattgagctattatgtggactgctttgattgggcatccgaaatcaccttgaagcgaccgaccgaagtccactggctcattgccgacacctatgcctatccgcactatcggttgctgcccgaactgaaacgcaacggcatgaaaggcaagctgctcgactgccacccgatgaaactgatgaaagccgtgctgacggacagccggatggaaaccatcctcaagtcaaaggatttacatgccgtgtcttattttgtaaaccgacctttggaacttgaccgatgctggcagtcgtataaggtagccacccggcatcactaccgcccttcggacatgggattgtgggcagacaccatccgtttgctggagcagtgtggcaaggacatctgtaaccccaagtttatctgtccgcagaacctcagagccgagcatgactattggatgaaccgacacaaccaaaaggagcagaaacgcagaagccgggagcagatgcagcgagccaaacggaaggaagccgagttctacaaggagaagttacgctacttcggtatcaccatcaccgacaaagacctggtgatttcggtactcgatagtctggaagccttccaaaccgagggaaatgccctgcatcattgtgtcttccaatgcgaatactatgccaaagcggacagcttgatactatcggctcatgacaaggaggggaaccgcatcgagacgattgagttttcactaaccgaggggaaagtgatacagagccgagggctgtgcaatacgaatactccgcaccatgaccggattgtccggctggtcaattcccatgcccatcagatactcgcagccaaacagacagcgtaaattccttatatatgttccactccgactttcgccgtgaggtgcaggtcggagtttttatatttcaaatagtagaaatagttgataatattaaattgaaatctaatgaaaatatctattgatatataatagagtttacatgataatatgtttaattacacattaaagttaggtaagtaaatctatattttattccctttgaaaaataatgtaaatatatgatatacaacatatagatagcttgttgtttttaataaaatataggtaaactaattgtgtagtaataaaataatatagtatatttgtagtataataatatagtagtaaaataatatagtaaacctataaaaatggaagtaaaaaatataacaatagccatcggcaatcagaaaggtggagtcggcaaaaccacttctaccgcatgtataggtgcagcacttgccctgagaggaaaacgggtgctgctcgttgacctggatgcacagcagaacctcacgttcacgctgacgcagaacgaagacccggaaacaagtatctatgatacgctggtcaaagaccaaccgctgcctatcgtacccatccgtgaaaacctggaccttgttccagcatcactggacttggcaagagccgaaatagacatggctaccatgatggcaagggagggcattctcaaatcctacctcgatgaacagaaggagaagtatgactacatcttgatggactgttcgccctcactcggtatcgtgacaaccaatgcgctggtggcagcggacaaactctacataccgctcactgccgaagccttgcccttgaaaggcttgaccatgctggatgatatagttcgggaagtgaaacgcagggtaaacccaatgcttgaattaggcggtgttttcttcaccaggttcaataaccggaagttgaacagggaagtgatttccatggtggaaaaacgatatggggagaaggtttttcagacgaaaatccgcgagaatatatccatagccgaaatgccgctgtctggtcagaccatctttgagtacgaaccgaaaagcaacggcgcagcagattatcaagcactggtagatgagataatcagtcgtgaggaaaataggtaaactatcttactatatgactaatcataaaagttattggtaacatagtaagttaatcagcaagtaaacaagtaataaaatacacaatatgagtaagaagaatttatccttattgatggatggcttcatgggtgaagccaatcaagcagaatcggtgcaggaacagcctaaggaacaaactactgaacaagcagaacaactaacagttctaaccgataagcaggaaagtccgaaggcggtatcttcaaagacagctactaaaaaggacgctaatgaaacagaaactaccgaaaaaatgaaatccagactggaagccaaacgcagggaaaatgtgggtcgccccaagaaaggcgaaacagccaaaagtaccaagaaaccccaggaaatccgagccacctttatcgtagatccggatttacttcaaaaggtgaagtacatttctcttgtggaaggtgccttattgaaggaggttatctctgaagctctgaacaactatgtggataaatgggaaactgacaaccggaaaatacgcctgccaaagagaaagtaagaacttctgcagtagttctgtcattgcaagtgccagacagcaatgacaggactgctgcgttacttgggaattgaggtctataaattatttatattcgtccgacctgccagataatgcttttgtgctaaaaattggggctatttgcaggaaacaagatacaatataaataaagccttggtagtttaaaataaatatgttatctttgcaacaacaaatcccgcccgcttcccgtaagattagcgtacccagcgggacattttttatttatgggagtcagatatacaaatcaagccataaccactgaacagcaaattgaaattctccaagaaagaggtttgcttattgatgatatagagcaagcaattgatgttcttgataccatcagttatttccgtcttgctggctattggaaacactttgaaatagatcattttacacatcaatttagggaaggcagttgtttctcagatatagtgaagctgtattcttttgataagcaacttcgagcattgctgtttactgctattcaaacaatagaagtttcggtcaggacaaaaataatcaagcatttttcccctggttttggtgcattttggtttatggatgaaacttttgcacttaatgacgctcgttttgctacaaatctggctgtcatccgtaaggaagtatcgcgttctcatgatgacttcataacagagcattttcgtagatacagtgaacctgatcttccccctgtatggaaaacgttggaagttatttcaatgggtacactatccaaactttattctaacttttcggatgctaccgctaaacatgccgtagcgagagagttcggcttgaatcatcacaaattcttgcgaagctggttggagtgtcttgccgtgcttcgtaactgctgtgcccatcattcaagattgtcaaaccgagtctttcctgtaaagcctaaaatgccggagcgtatgcctaataaatggattacagatttttcttttcgagaacagactctttatccacaattatgctatctggtatattggctcaattctattatcccagacaatacctttgttgttgatttcaaacaacttttgataaaatacccttcagtaaacactcgtctgctaggttttccttataattgggaacaagaacctttatggagatgagaggatttttgtacagcgaaaaatccatccggtttgctccgtgtcagtgacaccaagcaaaactcggctgataggcttttgctacaaatggaagattcagtccattgccacagagagaagcaacagggtttcgtttcgctccactcagttgtttctcacagtgtcaatgaggttggaaaacatatctacaaatgatgacatgctcgatggctctactgaacgcaggctgacgcttgcagaagtagagccatcgaatggtttatatggttagctcacagatgctggtcgccacttccgacttatcgtattttatgcgatgccggaagtgacggccttttgggaaggatatgccatccggtttgctccgtgtcggtgacaccaagcaaagcccggctgacaggctattactactgatgggagttccagttcattgccacagagagaagcagcagggtttcacttcgctccactcagctgtttctcacagtgtcaatgaggttggaaaacatatctacaaatgatgacttgctcgatggctctaccgaacgcaggctgacgcttgcggaagtagagccatcgaatggtttatacagttagctcacagatgttggtcaccacttccgactattcgtatttcatacaatgccggaagtgacgaccttttggggaggatgcgccatccgttttgctccgtgtcggtgacaccaagcaaagcccggctgacaggctattactactgatgggagttccagttcattgccacagagagaagcagcagggtttcacttcgctccactcagctgtttctcacagtgtcaatgaggttggaaaacatatctacaaatgatgacttgctcgatgactctaccgaacgcaggctgacgcttgcggaagtagagccatcgaatggtttatgcagtaagctcacagatgttggccgccacttccgactattcgtatttcatacaatgccggaagtgacgaccttttggggaggatgcgccatccggtttgctccgtgtctgcaacaccaagcaaagctcggctgagtggctttggctgcgaatggaactccaatccgttgccatagagagaacctgcaaggctccacttcgcttcactttgtaggttctcacaacggcaacggttttcggggatgtgcatcttcaagacggtcgggatgctgggttacgcggactttctaaggaatatgtttgagatgacctgttagaactaattctttcccttggagtcctaatcgggaaagtcttgaaaacctttggaacttcttggtccaactcgttttatccgtgcaaaggtactgcggacgggagaaacgtcaagtgccgctgacgctttcggactgaggactttccggcagccttccacaatttgtgccaaattgggtattccgtaaagtcctcggacctcacacttgccttattctccctgttgtccgcagtgaggaactgcacgaaaaacggttttcccgaccaagaagctctaaagggcttcacaagagggagaagaatcggaatcgcaaccatctaaattgttttaactatggattatctcgaattatccggagctaccatctccgaacgtgacaaggcttttgcacaagagtttgccaactttgtaaatggcagtatgtgctcacctgaccagattggcagggaactgaccagggcgcaccgctacctgcaacagcagatgttcaaggtgtttctcggcttcatgaagcagctggcatacaactatcagcagggaagatacgatgaccgcaacgagtgggcatcacggctgtccactgaagcctatcaacggctcattgagtgtgacttgatttttgaccccgaatttccaacctctaaatgacaggactatggacgaatatgattttcccgaatacggcagacaatgtgagttgataaccccttggcgaggctaccaccgaggaactatcgtagccctctctgaacatggttttgtggttcagttcagcagtggtgcagaaatagatgtttataaagacgaaataattttggattgatatgtgcagacttatgacaacgcagttggaggaagccttgaaaggctttcctctctattcccaagacggcaagggaaaggacgctatttgccgtgccatctttgcgctcggtggtgtgcggtggttcatccttgaaggtgaaaaagaaggaaacgacaccattctgttcggtatcgtcatcggactgatggaggatgagtatggctacatttctttgaatgaactttcggacattgagttggatttgaccaaacaaggcttcggcaagctgcaagtaaggcagcaggaaaacttccatccggtgccactgaaaaagttgcgtgacagccgtctgcaggagttccttgcaagaatgggttattgaacgtatgatttgtaacaagaaagtgacctgccatatccatcacggacttggcaggtctgtatgtagctttatgtcttatgagaaataaaaatgtattcagcattgcagccttgcttggctggactgtttctgtaaagtatgtagatggcagtcttttctttgacttccatcggaaaaccttgagcggtgttccgttttccttcaccgctgaaatgaaagatagaaagttggagaaccttatcaaggagattgaatcctttgtggatgccattgaccctgagacttgtgccggggaatggatgattcagtcaggtgctatggctccttcccggtatcagcaggcggtaaacgacatggataccatccggactgatgcgtggctgctggcttgcgaactgagggaagctgacggaaagtcattgctggcaggcttgccctggaaccaatggaactgaccccatattctactactattcaaagacagccttctaccgagatgtgctgtctttgaatttgcgccctttcttggggagacctgccgctttataggcaagcaggtcgcttccctggaatacgatgcctcttttatcggtatggatccggataaaaggaagcggacgttcctcatgtctgatgtagtcatagatggtacaccgatggatgccgaggaagatacaggcttccttcacggaatatcttttttccgggagtatcacaatcgtttgtatttgctgtatatagttcataagtattcttttgggtgtaaagttactcatgcaggtccattcttacaataggtaaaatctttgataatgagggatattgtgatgttttgaaagactttgtattactcattacttgttgccaaggtgagttcggtctttcctgaatgatttatatgggaatgacttgcgatttctgtttatgggatgtataagttcagaaacaggattggtatagacggtgacagttctattttgtcatctctgcctgcgaggatatttttttgcaaaggtattgctgtcatcaccaaacgtcaaatcccttgcagaaaatcttcctcaaacaagttgagcgtattttctgccctgaatttgccttattgggctgccagcactctgataaaagcaaaaaatatcccttcggacaagctgaaaaacagcaaaacagaagggaaaaaaatcagagcgtatggcacagattgacaataacctcaagaagcagttggcaaaacctcagacatggttctgcaagtattttcccaagcgtattcgcaacgtcggtgaaaaggaaatttccgacagacagatggtgtacgatttcaaagacggaagaagctttgaagcggtagcgcaaatgaccgcagcaaacatgcaggaacaatacggcgaatcctgcaagaatattgttttcgttcaagttccggcatccacaagttcaaagaacgaactccgttacaaggttttttgtgaaagggtttgtgaactgaccggagctatcaacggctatgagcatgtaagggtaatcggcggacggcttgccattcatgaaaaccggaagatggaaaaggaaatccgcaaagtgcatatcatcgattttgatgaagattggttcagtggaaaatccgtagtgacatttgatgatgttatcactcgcggcatcacatgggctacctatgctgaccagttggagaatttgggcgcacatgttatcgggggcatcttcctggctaaaactcactataaagtaaacagacaatgaaacaaagatttatgataaaggaggcttccatagcctttacagggcatcggaatattgcacccgaacagaaagataaggtgagagaacggctcagaaaggccgtttctcttgcttacaaggaaggaaagtaccaatgtatctgtgggatggctttgggtttcgacatgctcgcagcggaggaagttctttccctcaaagctcgtcttccttatctgcaactgatagctgttgtgccgttcagaggacaaaacagccgttgggacttggcagaacagcaacgatatgaccatatacttgccaagacagacaaggtgattgtgttgagtgatacctattataaaggatgtctgctcagacgaaatgacttcatgctgcagcattcaaactttgtgattgcctattatgacggaaaacagaaaggagggacttattatacttgccgtgaggctcggaagagggggatgactgtcgtcaatctcttttaatgccaaacattttgctgattccgacaaaaaccgctaaaaacattttgctgatttcgacaaaaactgccgaaaacattttgctgatttcgacatattgtgtatttttgtaatcaaataaactctcagtatatgtccgaaaaaatattcaaacgcaaaatttatgaaagaatgctccaatggaagcaggaaagtgatggacagactgcacttttgataaaaggtgcacgtcgaatcggaaaatcaaccattgctgaggagttcgcccgtagagagtatgactcctatatcaacatcgatttttcaatagctgatgcagcagtcaaagaattgttctcccatatttcagatttggattacttttttctgcggattcagtcactattcaatgtttcattgcatgaacgaaaatcggttatcattttcgatgaagtgcaactgtatccaccggcccgacaagccatcaagcacttggttaaggaccggaggtatgactatattgaaacagggtcacttctttccattaaaaagaatgtgaaaggaatcgtaattccgagtgaagaaacacgtatctctatgtacccgttggatttcgaagagtttttatgggctgtcaataaatcccaaacctacgatttgattagatactcataccaaaacttaaaatcattgggtgatgctgtcaatcgtgaccttatgcgtaattttcgtctttacatgcttataggtggtatgccgcaggccgtaaatgcttatttggaatcgaatgatttttcagccatagatgcggtaaagcgtaatattctcgaactctatattgatgatttccgtaaaatagacccgacaggacgtgcttcacgcttgtttacttcaatacctgcagaactctcccgaaactcgaagcgttatcaggtgggaagcgtgattgagaatgcaactgcctccagactgggtgagttgctgatggatatggcggattcgatgacggtaaatttttcctatcatgcaaatgaccccagtgtaggtttttcccttcatgccgattatgattgtttcaagttgttccttgccgatacaggactgttcgttacactcgcttttatggatcgcgattatacagaaaatgtgatataccagaaacttctttcggataagcttgctgtggatctggggtatgtatatgaaaatgcgatagcccagatgctcaagagtgccggcaatgaattattctactatactttccaggaagaaatagtcaaggacgaagacgggaacaagactgtccgtaactatgaggtggatttcctgctttcccgcaaagataagatatgtcctattgaagtgaagtcctccggatataagtcccataagtcgcttgatgttttccaggagaaattttcttcaagaatcctgcaaaggtatcttctctacacaaaagatgtaagaaaagacaaggatattttctgtttgcctgcatacatgacgggattgttttagatgaagacccatgagtctgctcacgggttatttatagatgacacaaagcggaatccttatctgaaaaccaaagatagaatttcgctttgtgtcttttttctgaaaacagacttggactggtgtggtgggagtccaagtctgccggttgtttcagagggtgcataggacatgccagcaatcaatgatggattgtccggaatacttaggccgatagacattgcccggattcaacggcttgatatagccgctttccctgtatttccggagtgtcttgtagcttatgcccagctcggcgcatacacgtttgacggaatagaccccgttcgggtcgcatgtaggtttcatttctctcataagcattaaattgttagattgactattcccaatggcggaagcatcaaggctggtagttgttcgaactgtcctgattcagcataccgttcgttttcatgtagctgatatagcttttggctgtcctttccttgatgtccatcgcctgcatcagttcggttacgagttcagtgtacgtgattttcttccggcttcggaagatttcttttatgataccctgcaactcctcctttttccgtttctccttgtcttcggccggcttttcaccggcagatacgtgcatatccttctgtttgtcccatgtgaaaagcagcatgggtacatccaacggactgccgtcacggactttgatagccttgactacggaataggcgggattctcatccttctcaatggagaggatggctgccgcttttctctgcagctccgagccgatgtgcccgcgcagttttattccgttgggcacaaaatgcagcacacagatgatgcaggttttgtagattccggccaggcggtacacttcatccacaatggcaatgctttccgcttcatcattggccgaacggataaggtctgcaatgccatccagtacaacgaggtggattcctccgtgccggtggtaatacaaatccatgctgtcacggatcatgctgatacgctcctttcttgacataggggccagatagaacgtatggtaaaaatccggtggtgcaggtaatccgatacgtttgattgtcttgctcagattcttgaataactgaaactcagactgctcggtatcatagtgcaacacggccttatcagagtagtttggtgaaacttcaaagccaagcgtgtcgatgttttgtgtgtcgtcagcaagtgtacctgcaatcagggctgatacgaaattgctttttccggtaccttcaccacctgttatacatagaaggttgtcgtaggtcccaagcggtactccgttgacggaaaccactgttttggaagattcgggaggattgttgtagtccatttcgcaagattttaaaagcatcatagtttgtgagtaaagcttctccagcatggaggtaatcagtacctgaaagtccgctgcactttttccggaagcaaagtaatcggaaatatccttgtctccctttgctccggatataggcagttccattctgagtacatgaaacgaggacaattcatccatgcgtctggcagattcgttccggcctgtatcgtccatatcgtacagaaagacaatatgacggaacttacggtcaaacatctcaatcagtgaagtgggtatggcggccgtttcactgttgaaacaaacggcattgaatcctttggaggcaagtgacattacatccttttctcctccggtgataaagaccatgtcccccttgttgggtagctgttccagaccgaaacagtacacctcaggcatctctcctccataaaagaaccgcatattctgatttcgaggccggtataccttggtaaatccaatgcccatgtaagcaaacatgggttctgttgcagatgaactgattttatacattttattggaacggttatagccctcaaatgactttaaggaatgtacattgtatctttctaaagtatccggcttgattccatattgctgccagtatgcaagttcagcaactgaaaagggtttaacctctgtatggtagtcctttcttattggattgtcattctcattcataatgatacgtttttcaactgcctttttacgagcaggcatatcgttgtttcctgtgtggactatggtgatgttcaggtccgatacaatacggttgatgatagcgacaaagtctcttttcacgtccaatccgtaaagcatgccgacgaaccagaagcagtcgcccgaatattcgttatttccgaaatccttcatcttgaacacttgggcatgccggtcataatagatattgcatgaagcaatccggtcttcgtagagcggattcctgaaattttttccgggtcgcaccggaaagttgatgtaatgtttgaacacggcaagcccgcggcctgtgcgttccagtatatcttccttgtctatcatttagtttcagttgtgcatttgttcagaagaatcccgtctttataatcagacagtcgtttgagtgcttcctccttcgccatacccggaatctttatgcggaaacactttattgccatgaacagggaactgtatgaaaaacgtacgccaccggtttcggtatatctgaaactgatggaacctcctttccgccatctgtacagcgtagattctgagatacagaagatggtcatcaggtctttggtgcttatttccaaggcatcgtctatatcacgatacaactctgttgtgcgctccacgtagctttcaatccggttgagctgttcaaccagtttctgaaaagcaatgctgtctatcgttatcacttccatactatttgttctttagattcttgatttgcaggttgtcttttcccaatatgtcaaggtattctttcagttgttgcgggctggaaacgttgatattgaggttgatccggcagtcttctttactgcgtctttcctctggggaaagtaaatcgtaccaattcatatccaaagccttgcaaatgttgctgattacatcaaatcttgccttggttttactggtctcaatctttgaaattacagaggtactaacgcccactaaaccagctacatactcttgtgaaaaacctttcaattcacgttgctttcttagcattgttcctatattttccataaaaataaagttagtagcttctaagcggcaattatctttcccaaacaagcaaattcttgtctcttgggcacaaaatatttccgtagaagcaagttcaacaaaaaattcagggaaataatataagagacataaaatcaacaggaacagtagtgaattggcgtcaaaaagtgccattagcatcactataggagctaatggcactaatttaccttcaactatttccgaataggagatagtcaataggtaaggcctgtataaactatattttgaaaagcataaatgtctcaagaaagccttttcacaaacatctacatgatttctttggcaaagccttccgaataatacaggtattgtatggttccaaatgattcgccataaccgggaaatgactgatataagtttttggtagtaagatgttgtttgtgaatgtagtcattggtgcaatgccacacacagtctccgttagtgcaaggtgcaagcctatatatatataaataggctcgcaccttgcactaaaaagtgtagcagtggagtggctgaaaatatttattataaagcatttggcaatgtgttcgttttttagtatctttgaaccgtgataaaatgatggcataggcattcaaaagggtttcaaaaagccttcagaaatgtgctacaattttgctacatttgttctttaccttgatgttataacgctgatatacagagagaataggctgacaagttcagaaacctgtctctccgcagaacctattggacaaaacaggacagtaagcggacaaaaacctacaaatcagcgatttgtaggttttttattgcctataagtcttgtttccaagacaacaaaagggaccacaacctccggcaggacagcataaagcgtaaaaccggaagggcggctagaaacctcgatacaatccagagaatagtgttggcgatattggctatctggaaaaataaaagaaagaaagtctctgacaaaatcaaagggacagccgaaatcatcagagaattatcgcaaaacttaaccaaagtgctacattttttagctcaaaaatgaaataattttagttttgaatatatgtaacatattgattctcaataatcgttttttttgacccacatcatgctgatataggtgggggaactgtacacattaattaaagtttaaatgaaaaagccgtgattgacggattgctaatattttagcatattattggataattaaataatttgtcgttactttagcatcgaataactaagttaatccaaatcaacaatctaactgatgtgcctgaaaaatgatagttacattggaaaacagaacattgcgctttcgagacttttttaacaaaaattatccgaaggtaaagacgtttgcttggcaactgctcaaatctgaggaagatgcagaagatgtggcgcaggatatatttgtgaaactgtgggagaagcctgagctgtgggaagaacgtgataagctggacagctatctatataccgtagtcaaaaatcatatttataatctgctgaagcataagaacgtggaacagaattatatggaagtggcaagtcaaataatgaaatgtgaagatttgagcataccaactccggatgatgagttgcagctcaaagatttggaactgttcattcaaatggcagtggaacgtatgcccgaacagcgcagatgcattttctggatgagcagggaacaggggttgaccgcttctgaaatagcccagaaactgaacatttcagtacgtacggtggaacagcacatttataaagcactgcaggatttgaaaaaaatcatttttttcttcttttttttctatttgcactaagtaggccggacaggcaagttgtctcttatatgaaagcaattgatttttatagcagaaatgagaaacaattatttaaataagatactggatctgttcttccatttcgattattcgaagccgatggttgaccgtgtgcatcgctggctggcggatgaaaacagacaggaagaaaaagatgctgtgcttcgtgaactatggacaaagacgaaagctgattcgcacatggatacggaacgctcgttcacgcaggtgcttgataagctcggacttggttatgcacacatacctgaccggttcaaccgtcagtggaggtggaggctggctgctgccgtagtggtcggagtggttttgtcatcagctgtcacgttctggttaagctatgcgttgtttgataaagataatgcggtcatgaccgaacaatatgcctttgccggtgaacggaagaactttctgctgcccgatggtacgcaggtatgcctgaatgctgattctcatatctattatccggagaatctggaaggaaagactcggaccgtctatctgacgggggaagctactttcaaggtggtgaagaatccgaagaagccttttattgttcgtgcggggaatatggatgtgattgccctgggaactgagttcaatgtaaaggcgtatctggaggatgaatggctcattgcttctttaatagagggaaaggtgcgggtggattgcaacgatacgttgagttatgtgctgaatccgggcaatcaggtagtctataacaaaatcagtcactcgggcacgatgcaacccgtcagtgtgcaggatgtaactgcttggcaacgaggacagattgtactgaccaaggccactgtcaatgaaattgtccggacactggaacggcattttggaatggctttccatgtttctggaggaaaatcgaacaatgatttatataattttgtttttaatgaagatgccgatatacgtgagatattggaagtgatgcaggtggtcgtgggaccgtttgagtatcaactgaaaaatcacgcatgctacatctactggtagcacaccttttgaaaccttattgttaattttaaatctttctgcctatgtgtaaaaatatccggaaaggcaccacccttgtccggatatgaaatgattttagtagtattctggatgaacttctatgcgaaccgactttcatcctatttgtgatagacactattgaatttaacactaaaaaacatcgctaagatatgaatttatatctgaaaaacattcaaaaaagtattttatttatttgcatgctattgtttgcctcggtcgtttatgcgcaacaaaatagtaaaatttccatcataaaaaagaatattacgcttcgggaagcattgatgtctgtacgtcaacaaactaaaatgtcggtttcctacaatgatactcaacttcccacacacaagctgaatcttgatattaaagacaaatctatagaagaaactctgcagattatattaaaggatacaggttttacttatgtggtaaaaaataattatataatgatcattccggagaatgcccggaatgaaaagggtaaaccacggaatatttcaggtgttatctctgataatggaggggaacctctgattggagtgacggtggttgaaaaaggaaccaataatggtacagtgacggattttgacggaaattatataatcaccacgcagacggctcatccggtactggtgttttcttacgtgggttatcagtcaaaggaagtaagcgtaaccgataataaactgaatgttactttggatgacagtgcgcaggaattgggcgaagtggtggtgactgctttgggcatcaagcgctcggaaaaggctttgagctataatgtgcagaaggttggaaacgaagccatcactacggtgaaaagcgccaacttcatgaattcgctatcgggtaaagtggccggtgtgaacatcaatgcttcttcggcgggtatgggtggcgcgacccgtgtggtgatgcgtggcccgaaatccatcagccaaagcaatcaggctttgtatgtaattgatggtattcctgtgacgggaagaagtcagggggagttgaagggggatgccatgatgtatgccaatcagcctggctctgaaggtattgcggatattaatccggaagatattgagtctatctcggtgttgagtggtcctgctgcagcggcgttgtacggatcggctgctgctcagggggtgattatgattaccaccaaaaaagggaaggaaggaaaagtgtcagtccagatttccaacagtacgcagtttgccaagccttttgttatgcctgagtttcagcacagctatatcaatcgtccgggtgaagtgaagacctggggtgacaaggctgaatctgcgtttggggcatacgacccgaagaatttcttcaatacgggtaccaatatacagaataatgtgtcgttgactgcgggtaccgataagaatcagacgtatttgtcggtaggtaccaccaatgccaaaggtattatcccgaacaatacctacgaccgctataactttgctttccgcaatacgacttctttcctgaacgaccggatgcattttgattttagctttaattacattctggagcgtgacaagaatctcacggcacaggggcaatggttcaatccgctgacttccttgtatctttttccgagaggagagagctttgatgccatccgtatgtttgaagtgtatgacccagtgcgtaaaatctatgtgcagaactggaattatggcgatgcgctcaagatgcagaatccgtattgggtggctcatcgtatgaaccgtactaacaagcgtagccgctacatggtcagcggaagtctgaagtatgatattctggactggatgaatgtgaccggacgtttgcgttgggatgatgcttatacgttgcaggaagacaaacgttttgcatctactttgaagctgtttgctccgtctgattacgggttctatgggtatgataagatcaatgaccagactctgtatggcgacttgatgctgaacatcaacaggactttgggagatttcagcatttcatccaacctaggtgcttcgatgtcgcgtttgagctatcatgtcagcgggttccagggtggcctgaaagcaccgtccaatgtcttcacccccaatgctattgattatggcaacgccacgaacgacaatcgtccgatttttgagcaatacaagcattatatcaactccttgttcctcagtgctgaattcggctacaagagtatgttgtatctgacacttaccggacgtaacgattgggattctgccttgcacggcacggcacagtcttctttcttctatccgtccgttggtttgtcggccattgtgaccgaaatgtgcaaacttccgcaggtcatcagttatttgaaagtgcgtggctcatgggcatcagtgggttctgctatcgaacccaacttgtcatcggcctggcgttatgaatataatccggcttcaggcacctataagacggtgacttataaattcccgcagaagttctatccggaacgcactgattcttgggaggcgggtgtaacggcacggctgtttaacaatgcctttacggtagatctgacgttctatcagtcgaataccaggaaacagactttgctgcgggatgtcacctcaggagcggcaggctttaacaaggaatatatccagaccggtaatatccggaaccgtggactggagctttcggtaggatatgctcaggcatggaatcagtttacctggaattctacactgacctacagtatgaaccgcaataagattatcgaattgctggaaaatccgaacgaagtggtgcgtcaggccgggttaagcggttgtggcgtggtgctgaagaagggtggaacgatgggagatatctacacctataccgacttcaaacgggatgcggaaggaaatattgggctggatgccaacggcaatgtgatgcagaccaacctggccaatccacaataccgtggttctgtattgccgaaagggaacatcggcttctcaaatgatttctcctggaaaagtttcaatctgggatttgtcattacggctcgtctgggaggtatctgtatgtcgcagacacaagccatccttgatgaatatggtgtgtctaaggccagtgcagtgagccgtgataacggcggtattgctgtcaataccggtaagattcccgctgaaggttattatgctgtggtgggaggtgacaacccgatctggtcagaatatatctacagcgccacgaatgtccgtctgcaagaggctcacatcggatatacgttccctaagaagtggctgcttggcaaggaactctctatcggacttactgccactaatctgttcatgatttacaaaaaagcaccattcgacccggaatctacggcatcaacgggtacgtattatcagggatttgattattttatgcagcctagtttgcgtaccatgggatttaacattaaactgaaactctaactttttaactttgtgatgacaatgaaaaatatgcatatcgtgagaacttggctgctgatgtcgggatttatgttgggcatgaactcctgtacggcaaattttgaagaggcaaaccgccccggacacgaaacgtctttagaggaactgggaagagacgactatgcggtgtcttccttcattaccgaattgcagaattttgcgtttcccgagcaggaaaacctctatcagaatatagaagacttaatcggaaattatctgggccgttacatgacgtatgccaaagcttctttttccgtgaagaactatacctgtttcaatgcaccggacgattggaaaatcgtgccctggagagatgtatttgcaccggctgtttcttctttcaattcggtatctttcctcactcaggagtctggaccgatgtatggactggctctcattttgcgtgcgcaactgatgcttcgctttacagatacgtatggaccgctgcccgtcggactagaagaggatgccaatgcctattcttcacaggaaactatctataatcatctgattaagacactggaccaggcgcttgacattatcaatccgctgttggaaaccaatccgaatctggcgctcaaagcagaagctgaccatgtgtatcaggggaaaatgcaacaatgggtgaagtttgccaattccttgaaattacggatggcaatccggatgagtgcagtgagtgcggatgcccggcagatagcggaggaggcttatcgggcgggtgtgctggaaaccaatgaggataactgcatgattgtatatgtgcctaacggacagtataagacttcggtggaatggggtgacagccgggcttgcgcagatttggaaagctatatgagtggtttcaatgacccgcgtgtccgttgctacttccagatacccgaaaactggggaggcagagaaattataggttgccgggcgggtgcaaacgttaccaacaaggatcaggccatgcagctctattctgctgcaaaggtagagcctaccaccaaaggtgtttggatgacggctgctgagatgactttctgccgggctgaaggtgccttgaaagggtggaacatgggcggcactcccaaagatttgtatgaaaaggccattcgtttgtcgttcgaacagtggggcgtgggcagtcaagtggattggtatctgactgatgcaaacagtacccagcagtcttataccgatgctccgggaggatttggtgaacctcatgcaccggtcagtaccattacgattcaatgggatgaccaagctccggaagctgaaaagatggagcgtcttattgtgcagaagtggattgccctgttccctgacgggcaggagggctggaatgaaatccgtcgtacaggctatccgaaggtgttcccggtgatgcaggccaccagcggctataatctgcaggtacccaaccgggttccgctcgacccgagagagataaccggtaacaataaggagaattatcgcaaggcggtggaaatgctgggcggtaaagatgactatgcagccaaaatgtggtggcagaaataaactcaagaatcgatgtgtaaccgtaaaacaagaaagaaaatgaaaagactctttacatatatattaggactgttgggattctctttcgcactgactgcctgtgacgactggctggaaactgaaatcaagaatcctgccgatttgataaactctgcaaaagatgatgcctattatgaacggctgcgtgcttataaaaacagtgatcatccggtggcattcggctattatggtaactggacgggcacaggagcttcctatgagaattcattgaagggcttgccggacagcgtggatttcgtgtcgctgtggggtaactggaaaaatcctacacctgccatgatggacgacttgcgctatgtgcagaaaaagaagggtaccaaggtgctggtctgtttcctagtgcttgacatcggtgatcagattacaccgcccatgccacaggaagaaattgataacggtacttccgataaggagtggagacataagtactggggatgggattataacctggagaaccgtttggctgctgtagaaaaatttgccaatgctatctgtgatacgattgacaaatatggatatgacggatttgatatggatgctgaaccaagcatggctcatccgtttcccaccgataaagagttatggcaaaatgacaagcaggttatccagaaatttgtagaaacgatgtctaaacgggtgggtcctaaatcaggcacaggcagaatgttcctggtggatggtgaacccgatgcgcttcctgcccatctgttctctcatttcgattatctggtgttgcagacttatacgacgcacttcatacaggacaacagccgtctggatacccgttttgaaaagcagtaccagcacttcaaggaggaagctgtggtagatgagattgcccgtaaaattattgtttgtgagaattttgaagattgggccaaaaccggtggggcggatttttatttgccggacggaaccaccgtcaattcgttatctggctttgcgctgtggaatccgtcattgaatggggcacagtaccgtaaaggtggagttggaacctaccatatggaatatgaataccgggtgagtgcacaaggcacggatacgtatccggctctgcgtaaagccattcaacttcagaacccaagtataaaataacctttaactaattacagaatgaaaaagaataacatacaatcaatcatgatggggttggcgtttgccgcagcgtttttgacaggctgtgacgatgccgagtattcaatgttgcggaaccaggcttatgtgtcacagaccaatgcaaatcccaatacggctttgaaggtttttattgatcaggatcccgtgaaagtcaatctgaatgtgagaatgtctgaccctgctgccaaagacatgaagtttgagctcgtagaggatgctgctttgctggaagaatataataagaccaattttacggcctatcaattcctcccggctgaacaatatttgctggtgggcggcaatgtggatgtgaagcaaggacatgcgctttcggaagctgtggaactgaatatccaaccgctgacgcaggaaatgaaggacagcggaaacaaatatgctgtcgctttgacgttacgcagtaaggatggcgaatcgcaagtgcttcaggccggtggaaacattgtttatctgctcgaccctgccatcatgacttcggttccggtgtttaatgccactacaaatgccagtttcgaactgactgaagatctctctctgaacgaatggacccttgaattctgtatcaacatgagcaaattgggccagaaggtcggagatttgaataaccaggccttattcgacggttccagcagattgggtgaagaggacggacaaatctatacgcgtttcggtgatgcgatgattgaaggaaaccgtctgcagataaaaactcagggcattgtgatggacagcaagatgcagtttgaagtgaataaatggtaccatgtggcatgggtatgtacgggcagtaaagtatatctctatgtgaatgggaagctagataactcgaaagatacttccggcaaggtgactaacctgggcaagaataaatgtaagatcgggaatacggattacctgaaagcagatgtccaaatgagtgagttccgactttggacacgtgccttgtctcagcgtgaaatagccaataatcagtatgccactgatcctcatgcagatggcttgtttgcctatttcaagttcaacgaaggacagggggacgaatttgctgatttcaccggacatggcaacaagggctggtgcacttcaccggtgcgttgggtaccggatgttcagctgaacgccaataaataatcaattacatacctaaatatgaagaccatgaattttattaaattaaatactattttatcagtagcctttcttttcttgttggccggattgacgtcttgtgaaaatgaaccggaagtggaaagtgcgcttttcccggaagatgaaagtacgcatgtcgtgaaggcttatatcgacaattattgtttctatcccaagaataccatgcagagccatttgctgcagctcggtgcaggtggcgaactgagcggtggagacaagcctgtggaacttaaggtacagctcactcatgtagccacgcaggacctcactttttcgttggtggtagatcgtacgaaattccagccggaagatgatgagactattttgctgggtgaggatgcggtgtcttttgctacgcagcaagttaccgtgtataagggagaacaggcaagccgtgaagctatttcattctcgttgaacaaagagtctcaatcactcaagactttttcaggcaatggggtattggctttggcactggtatccaacgatggagtggaagttgtgccggggtatgatacgtatgtgtggaaagtaaccaaagaggtttccaatattaatgtcggcggaaacctgcagggaaagaccatgattccggtgactgaatatgatgtgttgcaaagttattatggaggatggagcccgactgacgatttgagtgatggcgttactgataactattcctatattctgttctattctcaaaatgaaggacataacgagttccgtgtgcagttccatgatgaacagcctgtagtaggtctgacagttactccgtttttagaatggggagactggtcactcagctgttccaaggtagagttgtggggtggtgaagatgaaaatcatctcactcgtatcggagttgccgtcaatacaggtgccacgcccacatcctatatgccttgggaggtcgcctttttggatccagtcaaggtgaaattattgaagatattggtattggataattttacgaagggaagttctcagaatgtagttataccggaagttcgtttctataaataattgcgcgtgctgaaacagactgtttctttgagatgaggttgaattctaaggaggcacttggaattcaacctcttgcatcaccgatatgtatgctgaaaaccagcaatttatactttgaataaaaacacctgtgccccccttttgcacctcgtcttatccttttcctgttttctcctaatcccgaaaaacaaaaattcccttgaattatttccctttttcgttcaaaatcgctatcttatgtaaccataactatgagccagatcatacaattctttttcctgttcttcataggactggctatcagtagagacacctgacttcgtcgcttctgatgtataaaaaaatctacatactcattatcagcgatatacaattttaacgtgagttagaaataaaattagaaaatagacagttgtccgtcattgacaaaatttacgtcaatggcgggcttcttttcaaaaaagcagtatgccgcgatagccgacaaggagttggctataaagttattgaatgaacgatgtccggagtgttctatctgcgcaatgttcttcaattcgtcattgactgtttcgatcagggctcttttctgagcaaaatcttgtcggcaatactcatcagtgaattcttcatattgtttttaactttagtgacaagctgtatgccattaagaaaaaggttctcaaacagagcctgaccaatatatcctttgtctgcgcatagttttcctttgatgttttccagaaacttaccttgcttcaacggttcccggtcatccacgttttcaggcgtgaacatgaaattgagatctctccttttatcattgattatcagatgcaacttgaatccgaagaaccatcccactgaacatcttccacgctcggcaagtccctcaaatgtcttatgaataaggattctttggttacgacaaacacgtaagggagtggagtcgacaaaactgatgccggtacaggttcccagcaggacttttttgatgaagatagtcatgggaagcaatacttccttctccagttccacaaaacggttataagaaacctgacgcggaaaaaggtgtttcagatgtttacaggcatattccttgtagtaatgcttgaaacagcggaaaccaccggagtgaaacaggataagaataaccataatctcagcgtcactcatacggttgggcttgttacgatgcctggtcttcttatccttaatcatatatttttcctgttgaaatgtaaattccttgcaaaaatcatcggccatacaataaatctctgtaactttagactctggaaacatagcggtaatcgtttaaatgttataattcagcactataaatttaatacttttatcgctatgtttctaattataagtgaaatatatttattcttatatcgaactcacgtaattttaaaacagctgtttagggtgacgcaagctcaaaaatgatatatttgtgctatgttcatccgcaagaaaaagaataagtcaggaaccacgagcatcgttgtagtcgataagcatggtaaaaagttcaaggaacttcacactgcaggagtagctgttgacaatgacgagattgaaaaactttgtgcccaaggacgtgaatggatcaaccgccatttaggtattcttgaactcgattttgaagaatcagacaaaaagaataaagaatttgagtcagctaacgcaatgcttgataacattgattccgtgctgctcaacggtgcgaaactgatacttgacaaagtctatgattcgattggattcaacaaaatcagtgataatgtattacgccaccttgtaatagcaagactctgtcagccaatgagtaagatggctacagctgattatctcaaaaatcattttgacgaagatgtcaatctgagccgaatctatcgctacatggataagttgtacaatacgcaacaggaagaagtccaacgcatcagcgtacaacatattttctatacttagcggtcgagtagagatgcttttctatgacgtaacctcactctattttgagagttttaaagaggatgtgttgcggacacccagtttttccaaagacggaaagacagctgaaacacaaatttctgttattgctgtttgttttttcttataatgctctttgagaacttctttactgccattcggctttctcagttcaagcaggtatatgtcactaaaatatatcagtttacttagaatggacggcttaatatctttaaaaaacgatatttcatcgttagcatcttgaaaagtgtattgatgtgtaaattctctcaattcttcgaataaaggtctgataaaattaatcatagaaagtgccttatcagaagatatatcgctatcgaaagaaaatatttcaatttctatgtttattttggataaaaggtcttttatgaatatgttattgtagatgttttccatttacttcttaatattaaatagtttactaaaaatatcgaataaacaaaaggtttcttttatatgatagtttaaatctacaacctctttattcttatctttactagatattaaaagcaattattcaattagcaaaaggatgttttgaatttttttatctgcttttttataccctctttatttcgtatatccgacaggatgatttagtaataaatgttgggacttttttagttttaatattttttccaatgcatttttatccattgtcatccgtggtactgtaactaagccagccgaggaacagaatagtgaaatattttgagaaataatcccagtatcacaagctcctacaattagcaactgttcaggatttccgctattgaagcgggacaagtcagcaaccagtatcagacatacaggggcttctgttacaaaattctgttgtccggctacggcagaacgataatcacctttagcaataggttgcaactgatgtgctttagcatcgtataaataacacccatctttcatacatacatatacgtcaacttcctgtacgttatttaccgatggtgcggtacgtttaccttctgacggacggtttattccgttggctgcccaaagcaggtcggataaatcctgatgcatcagttgtttattggcaaatgctcgttccgaatgtcttttatccaatgcctgcatcaatgtaacatttctgcttttatccggcttattcaaatttataactttcaattcttgagcctgtaatcccattataatgcccaataataaaactgataaaattacttttttcatatctgctcctgttatttactcaaatgaagtctgattacattttcaatgatgggttcataattcattttatcaaacttgacgaataaatcatcttttgagccaataacaccaccgtcaccaataaccattggagtgacattgaaataaatgtctgttaccaaatccttgtcaaggaaagcattgtaagtctgtactccgccaccaacgactatttcttccattccttttcctctcaggtattctaccgcttcttcaggagtatgaacggttttgtgaccgcttcgggcttcgtgattgttggatagcacgacgatttcttttcctgcaagggcatcttgcaacgcatcgataaacatggtataagtagaatacccaaaaacaatgttgccggactcaatggctttctgtacaagaaatcccatgacttccggtgctatctgatgattgggattgtttgccagcaatacttttccatttgctgacactgacgcaattaatgttactttcatacgattgtttttttattgttaatattagaaacatcctttcaatatcgaatgaatgttttgatttgatgcaaaagtagtgtatctttgcttactaaagtatatcaatatacttatgtatagtaatatacaagagtatagttatggactatttaaataaactggttatatggaagactttaatggatgcccttattcaaatgttgttgctctaaatgatacgctgaccattttattcggtaaatggaagcttaatattatccgggctttgctttttagaaagtataggtttaatgaacttcaaaagaaaatacctcatattactccccgtatgctgtcaaaggaattaaaagaactcgaattgaacggagttgtaaagagagctgtttataatacagtgccagtgacggtagaatatgaattgacatcttccgggtttcggttgaaagaattaattgcagcaatgattcaatggggtgttgctcatcgggaatatgtgaagagtgtcaatatcaatgattgatacgttacataagttaattatccttaggtaacttggtgtaaggtgcaaacctatatatagatatagtttgcaccttacactaaagcttaaaggttgtaaatcaaatatttgcatagttcaaaaagaagccgtatctttgaacccgtgagataggcagacaaacagcggacaaagccggacaaatagccctgcaaaaatcgttactgtttcgttacctatttgaaattttggaaaataaaagactgatttataagctgttagatgtttgggccagtatccctgtctctccgcaataaacgctgaaaatcagcaaattgcaaaataaacacccagttttacaccctataatgtaaagccgggtgtttttgtataaattaagatttatataacgataaagtccataaagaaatctacatcttatgaaatctttatggactatattggatattttttgaagagtaaatcagtatctattcagtattcctgaatctttatctttattctgcatcttcagtttcacgcctgacttggactttccgaatgagaagttgtaaacaagatttatatacaccatattggcattgttgatgatcctttaggtttctgtacgttgcagaagcggtgttcccaatacggatgaaactattatctcctattcatatttattctttcttttatacaagtattttatagataacaattgtttgaagtaattctttttcttaatttgattctggattagaattggctattgttattatttaacatcgatttccgtatatgctcttaaatagtgtctataccgttttattaaaatagccttcaccttttcactgctatctcctattcatgggtgttagcaggtgaagggatgctccttcagcaagtatacatagcaatattatagtccaaaaagcagctagattttctcttgcagggcagacgcattaaaaattattttcctgtaaaagttgtgataaatatttttcatcccatccggcttttagtcttttcagattcatgcttccttttgttgttttctcattctttagtatggtaagcgccatctttgttgccaccgaaaagtttctggctgcatttttcacctttttactgtagtcttcccgaaaggtaacatccagttgccaatgaagattattctcaatagaccaatgctgcctgatggcagacgcaatctcctccggtttggtattatcaagtgaagttacatagtatctgacctcttgagtatattctcctgttgctactattgtcctctccgactttatccctacaatagacttcaaccccacaagtttcttcttaaacattttctccataatagatccataactgactacagtgcatgttcttgtctcaatccttccatgtccggtgttttccgacacatgcctggtgactctattgattatttcatctttatcctgataatcgtcaatgatttgtttagccagttgataattttttttcttattctcctttatagctataatataatttgcatcatgctcaataatggtctggggtatatctttctggcaccccatcgcgtcaattgtaacaatacagccacttagttccaaagagttaattaacaatggaatagctgtaatctcattgcttttatcatctacttttacctgacctaaagaaagtccattagcggcagaccaggcggaaaccatccataatttgaatccttcttttcccgtagtatgttctccatcacattggcttggaccacgcatgagcttgccatctatagctacaacgcctttcacctcctggcagacttgttttacccaattacgaaagatcaactcaaaatactcaggctttattatactgaagaatctattaaaagtatcatgactggggatggactccaggtcaggtatgcgacttttgaaaaaagtaattttcgcattgccaaattcctcaatctcattccaggattgggcgccacagattacagcagcaatggatatatagataatggtttccattttatgtacttttttacggttcatcctaggatcttctatttgtttacaaggtcaattatgccaattttcatgttagtttatgttttaatatatcttataaagataagaaaaacaatcgacataaacaaatggtaatatactaataaacaataatataacaaaggaatagcaaaggagaatatagtaaaaaatataatgcgtctgccctgttttctcttgatgtattatacttatcattactgtgataagaatttatcatatttatgatacttacttatcacaatagtgataatatcttatcattttaatgataaatgaaaaatataggcgttagagtcacgtttgttcaagaaataagccagacttgccgggtaaaagcgggtagatacttccaatagtttttttaattaagatgtaactgaaacaaaatgatacacatatgtaagcgttgtttgcattgcttgaataataaaatgctaatgttccttatttttaccttgtgaaacaaaatactttcttgactttttaataataagaattacctttgacggataaaatgatggtagacgctatgaggtatatacgacttggtgtatgtatatgtattcttttatttgtgcataaccaaattttaatggctgatgaggccacaaatgcagattccataactactgaatatataagaagtatttatattgagaagccgaaatgtgctttgaaacttttagatgtagcggagaataaaaagtctatgcctttacgagttatagacgagttacgtagcctgtcatatcgcaatttgtttatgaataagcttgcttatgtatatgcaagaaaatcttatgtgcttgattccgtatatcaaaaggaccctgaacacttattgaaaatgactgtttatttggcggaattatctttcttgatgagtaaatataacgagagtatgaattatgcgcttgacgggattgcccaatcaaaaaggttggaggaccgcgtgtccgaagcccggttgctatactgcattggagagaataaccgtatgttgtcatttaaagataaagcgtatgattattttgattctgctatcgatttgttgaaagggagaaaaggcgtaaaagagataggaatgctctcttctttctatggagggaaaatgagttatttaatgactgactctttgtatgaggatgcatctgttatggctttggaacgtgaaaagcagataaaaaaattggaaactttacctgatgttccgaaaggattggttgatatgcaatatggttatctgtactctaaatgggcatataattgctatatggaaaagaaatatgggcaggctgaaaagtactttgcgatgtatcaatcgactgaatactctcgtacacctgatggaaaaatgtattcaattccttatttgctggcttccaagcattacaagcaggtgattgacaacagtcaggagtttaaagaactgatgaggaagcagcaagatactatcaatgcgcaatatatgaatgtgcttgaaagggaagtgcaagcctatatggggatgggaaactataaggaagcggcaattttgcaaggagctattatagctataacggatagtattaataacagggataaagagaatgcggcattagagttgaatacgatgtatgatacttctgaaaaagaggactatatagccaaacaagcattccaattaaaagtcagaaacataacattgacctttttgacgtgtattacgctgttgactttgtttgtattatggcgtatgtggcgtttcaaccatattatcaaatataagaataaaatccttgctaagtttataaacgagagattggccaggaaaaaagacagtcagtcattggatattgatgaacagcttatgatctcacaagatatagaagatgaaagtattttgtttggcgaccaagaggagatatctgatgaaaccggcaaagcgagcggggaagaagaagagaataaaaaaatatttattgaactgaaccgtattgttgttcaagaccagttatatctttcttcagaattgtcgagagaagatttggcacaactcgtgcatttgaataacgcacgttttgcccgaatgataaaagaatgtaccagtactaattttaatggatacatcaatgatttgcgtatagattatgcaattaaattattaaaactgcatcctaattatacgatacgtgccatagctgatgaagtcggattcaacagtaccccgatattatataatcttttcaagaaaaagacgggcatgactccgtacgagtttaagaaagcgcaagaatctctttaagaattaggtcgtacaatgttcttgtatagttaaacaatttccagccttatcggtttattctaataagtaatcaatataaataatcatgatacaggttaggataaagcgagtatacgaagacttttcggaggcagacggatatagggtattggttgacaaattatggccgcgcggaataaaaaaggaatggttgagatatgattattgggcaaaagatatcactccatccgctgctttgcgtaaatggtttcacgatgatataccgggacactggaatgacttcgtcgtactgtatcagaaagagctggatgcttctctggcagcgaccgattttctggcccttatcaagccgcgtccggtagtaacactcatttacgcttctaaagaacctgtatataatcatgcccgaatactccgcgattatctggaaatgcgtttgaaagagtgaaattaaagtaatttttatctgcttacgctttctgtcgttcactcaatttcctacctttgtaatctaaatcaaaatcgtgtagccatgaagtataaattattggtcttggatgtagacggaacactactgaatgatgcgaaagaaattagtaaacgtacgctggccgctttgttgaagattcaacagatgggagtacgtattgttttggcttccggcaggccgacctatggtttgctgccgttggcaaaatctcttgaacttggaaattacggaggttttatcctttcctataatggttgtcagattatcaatgcacagaacggagagattctgtttgaacgtcgcataaatccggaaatgctgccttatctggaaaagaaagctcgtaagaatggatttgcgctgttcacgtaccacgatgacaccattataaccgattcttccgagaataaacatatccgggatgaagccgaattgaataatttgcgggtgataaaggaagaagaattctcctcagccattgactttgctccttgcaaatgtatgcttgtcagtgatgatgaagaagcacttgtcggtttggaagatcattggaaaagacggctgaacggagcattggatgttttccgttccgaaccctatttccttgaggtcgttccgtgtgctatcgacaaggcgaatactttgggagctttgttggaagcgttgaacctgacacgtgatgaggtcattgctattggtgacggtgtatgcgatgtgactatgattcagttagcggggttgggaatagctatggggcattctcaagactcggtgaaagcgtgtgccgattatgtgacagcgtcgaatgaagaagacggggtagcccttgccgttgaaaaagcaatcatagccgaagtccgtgcggcggaaattccgttagaccaactgaatgcgcaggcgcgtcacgcattgatgggaaatctgggtatccaatatacgtatgcgtctgaggacagagtagaggcgacaatgcctgtcgatcaccgtactcgccagcctttcggcattctacatggcggtgctacgcttgcattggctgaaacggttgcaggactgggttctatgattctttgccagcctgatgaaatagtagtgggaatgcaggtcagcggaaatcatatatcttccgcccacgaaggagataccgtgcgggcagtgggaaccattgtacacaaaggacgctcatctcatgtatggaatgtggatgtctttacttcaacaaacaaactggtgtcttccgtacgggtagtcaacagtgttatgaaaaaaagatgattgacgaagaaataagtaatctgacagttattgatgcgcttatccggcaaaagcgaccttttgtggtataccgtattcccggagagaaacttccccgtctgttgacacaggcggaggaggagatccgtttgatatacgatttgcaagagttgaacggacagaaaggatttgttatcgctccctttcgggtgagtgagatgtgtccggttgtactgatacaatctgatggctgggggcaatccctttctcttgacgatgatacggaggaagaatatgaggcttctttgcaaatacaagagcaagaaaattttcagacctcttacacgaaggagtatgccgactgttttcaagcatttatcaatgccttacgtgacgggacttttgacaagttggtactttcccggcgtattacgatggataagggggcggacttttctctttcatccgtatttcgtgcggcctgcaagcgttatattcattcatatatatacctatgttacactccccagaccggcatttggttgggaagtactcccgaaattattttatcgggtgagaaagatgaatggaatacggttgcactagccggaacacagcctttgcaggatggcaaattgccgcaagtatgggatgaaaaaaacaggaaagagcaggattacgtaactgcttatatccgtagccgacttctttctttgggcatccattctactgaaagcggaccttatcctgcatacgccggagctttgtcacatttgaaaacagattttcatttctctttgagagataataatggtttgggagatctcctgaaagtgttgcatccgacgcctgcggtgtgtggtttgccaaaggaagaggcctatcgctttatattggaaaacgaagggtatgaccgtcgttattattccggttttatcggatggctggatccgaatggaaggactgatttatatgtgaatttacgttgtatgcatatcgaggatgaacgactgactctttatgccggtggcggactattggcctcttcggagctgaatgatgaatggctggaaacggaaaaaaagttgcagacaatgaaacgtctgattacttccacctccattatcgctaattactaatcattaacaagctaatcactaatcatcatgtatacagacaagaaaaacatactccaactggttgcgttgcttgaggcgcacggcattactaaggttgtgttgtgtcccggtagccgtaacgcgcctattgtgcatactttgtccaatcatccgggctttacctgttatgcgatgactgatgaacggagtgcgggttattttgctatcgggcttacgttgaatggtggcaaacctgctgcaatctgctgtacttccggtacggcgttgctgaatcttcacccggctgttgcggaagctttttatcagaatgttcctttggttgtcatttctgcggatcgtcccgctgcctggatcgggcagatggacggacagactttgccgcagcctgatgtattccggacgttggtcaagaagtccgtgaatcttcccgagattcatacagaggaagacgaatggtattgtaatcgtctggttaatgaggctttattggagacacatcatcatgggaaaggaccggtacatatcaatgtgcctgtttccgaaccgctgtttcagtttacagtggacaaattgccggaagtgcgtgttatcacccgttatcagggattgaatgtttatgaccgtgattataacggtctggttgaacggatgaataaataccagaagcggatggtcattgtcgggcagatgaatcttatttatttgtttgagaaacggcataccaaactattatacagacattttgcctggttgacggagcatataggcaatcagaccatacctggcattccggtcaagaatttcgatgcggcactttatgctgttccggaagataagatggaacagatggttcccgaattgctgattacttatggggggcatattgtttccaaacgactgaagaaatttctccgccaacacccgcctaaagaacattggcatgtgtcgccggatggtgaggtggtcgatttatacggttcgttgactaccgtgattgaaatggacccgtttgagtttctggagaagatagcaagtttgctggataatcgtgtgcccggatatccccgtgtgtgggagaattattgcaacactattcctgaaccggactttgcttattccgaaatgtcggttgtcggtgcattggtgaaagctttgccagagtcgtgcgcattgcacttggcaaatagttcggtagttcgttatgcccagctttattcgataccttcaactattgaagtttgctgtaataggggtacgagtggtattgaagggtctttgtctacagcggtcggttatgcggcagcttccgataaactgaattttatcgctatcggggatttgagtttcttctatgatatgaatgctttgtggaatgtcaatgttcgtcccaacctgcgtatccttttgttgaataatggcggaggagagatttttcatacattgccgggattggatatgtcgggcacatcccataagtttatcgcagccgttcataagacttccgccaaaggctgggcggaagagcgcggatttctctatatgaaagttgaagatggggatgaactggcggaggcaatgaaaatttttactcagcccgaagagatggaacaacctgtgttgttggaggtgtttaccaacaaaaacaaggatgcgcgtatgttgaagaattattattatcaaataaaagaaaaataggttatgtcaacacaaagagagtggactacgatcagagaatacgatgatattctttttgattattataatggaattgcccgtatcacgattaaccgtgaacgctatcggaatgcgtttactccgactactactgccgaaatgagtgatgcgctacgcatttgtcgcgaggaagcggatattgatgtgattgttattaccggtgtaggtgataaggctttctgttcgggaggtgaccagaatgtgaaaggacgtggcggatatatcggaaaagacggggttccccgcttgagtgtactggatgtgcaaaagcagatacgcagtatcccgaagccggtgattgctgccgtgaacggatttgcgattggtggcgggcacgtgcttcatgtggtatgtgatttgtctatagcttccgagaatgctattttcggtcagacgggacctcgtgtgggaagttttgatgccggattcggtgcttcttatctggcacgtgtggtaggtcagaagaaagccagggaaatctggttcctctgccggaaatacaatgcgcaggaagcgttggatatgggactggtcaataaagtagttcctttggaacaattggaagacgaatatgtgcaatgggcggaagagatgatgttgcttagtccgttggctttgcgtatgattaaggcaggactgaatgccgaattggacggtcaggccggaattcaggaactggcgggagatgcgacattgctttattatctgacggatgaggctcaggaaggaaagaatgcctttttggaaaagcgtaaaccgaacttcaagcaatatccgaagttcccctaaaaatgatactttgatatattatttacattcaatggattgcaagattaagatcattccccgattgctccatttcaagcagccggcaggaacttcgcgaggtacatactccacccggaaagtgtggtatctccattttacctcttccgaatttcccggtcgggtgggaataggggagtgtgctcctctgcctgcactgagctgtgacgatcttcccgattatgaagatatattaggagcagcctgtcgggaagtggaaaagcaaaatgggagattggatgtgggcgctttgcgtaagtatccttctatccttttcggacttgaaaccgccatccgtcactatcatacgggagattgggctttgtgggataccgctttctctcgcggagaaacagggattcctattaacggccttatctggatgggcgacttcaataaaatgctggcgcagatagaaacgaaaatgaatgtaggtttccgttgtatcaaactcaaaatcggtgcgatcaactttgaagaagaattggctctgctccgtcatatccgtgcgcacttttcttccaatgagattgagctccgtgtagatgcgaatggggcttttgctccggctgacgctatggagaaactgaaacggttgtctgaattggatttgcattccattgagcagcctatccgtgccggacaatgggaggagatggcgcgtcttacctccgagtctcctttgccgatagctttggatgaagagttgatagggtgtaatactctggtagagaaacggaaactgctttctgccattcgaccgcagtatatcatcctcaaaccttcgttgcatggtggaataagtggtggaaatgaatggattgcggaggctgaacgtcagcgtatcggttggtggattacatctgctttggagtctaatatcggtctgaacgccattgcacaatggtgcgctactttcgacaatccgttgcctcagggattagggacaggattgctttttactgataacgtagaaatgccgcttgaaataagaaaagattgtttgtggtttgacagatgatggtattcaatcgacaaaagcaacgcttgctgctagaaggaaaggaatatacacctgatgatatacgcagatgtatggtgcggggagtagaaaactatccttccgccatatgggatttattcctttttctacaggagtggttcaacgattcccctttacttgcggttcatacatccgggtctaccggtatgccgaaaaaattaatggtacgtaaagaacaaatgatgcagagtgcgcgtctgacttgtgaatacctgaatttgcaggcgggagatacggccttgttatgtatgaacctccgttatatcggagcaatgatggtagtggtgcgctctttagttgcaggtttgaatttgattgtgcgtcctgcttccggtcatccattgtccgatatacacgaaccgttgaagtttgcggcaatggttccgctacaagtttataatactcttcaggttcttgaagaaaaggaacggttgaagcaaacggatattttgataataggcgggggagcggttgatgtcggactggaagcggacattcaatctcttccgggagctgtctattctacttacgggatgactgaaactttatcccatatcgctcttcgccgtctgaacggtcctgcggcttccgaacactatcatcctttctcttcggtgcatttgtctttgtctccagaaaatactttagtgattgaagcacctttggtttgcgctgatattctgcaaaccaatgatattgcacgcatccatcccgatggaagtttttctattctgggacggaaagataatgtgataaatagcgggggaattaaaattcaagcggaagaaatagaaaaaaaacttcgcctgttgattccgataccgtttgttattacctctgttccggacaagcgcttggggcaggctgtggttttattgctggcggaacagccggatatacaagagatggaaaaaggaatacaaacgatattggaaccatattatcgtcccaagcacattctggtagcggattgtattccgcaaacgggaaatggaaaagtcaatcgtgcggattgtcgtattttggcacagcgcctgctacaacttctgaatgattcatcctgttaaaagtaataccctagattcacaaaacaacttgctttatccgtctggttggagtagcccaatgagatttccaatggcccgaagacgctgtccattccataaccggcactgataccgaacaattgcttgccttttaatattttgaaaaaatgactgtccgtcagtccgtagtttccggtcaggatgaggtaatggatggctcccatccgttgtcttaattttaaagacgcaatcataattgcattatccatcagttctatattgttgactccggcaaatggtaattgctgaggtatatagaagccgggaacttcacctccgattgcattttgcagaggatagggaaagtttctcccgatcaggatacgtccatagatggaaggaatgacggagaagcggcgggtgatgggaagaacacttgcccatgaagcactcaatgcagagaaaggagcatgttcgttatattgcgccatattatccgtatagagggaataggcagccttaaagtcgctgcctttggcggggaaatatcctttatcgtatgtgttgtaatgtatttgggcaaaataactcagaaaatgttccgattctactttcaaatcaatcagttccggttgtttaaacaggaaatctttgtatttgtagtattcaaaacggagtccgagcccgaaacggaagtttttgtaccatacatccgagaagccgaattcggctaagtgatatttataggttgtattgtaggcacggtttcccttctcgtagatgttgatgtcgttgtattggaacatatatgagaagttgaaattacgctgctgcatgggttcgagtgtatagtcgatgcgtgcggcatatcgcttacccaaccgtccggtgagggataggcgggaaggaatatgagtcttgaggtctgcagtggcattaagcaacagagaggcaatctcttccgaatcgaagcggatacccagattgattcttctttcatatttctcttgcaacaggaagttgagatggtagccttcgggagtatctgtcagtgtataactggcactagagtaagactggctaccgcgtaacaggtctaaggcctgttctatttgctgcgtcgtaatgttactgttttcttttaagttacatttcttcattaaccattttttgtcgtcagtctctactccggagaaagaaatatctgtgacgtaaatggtgcgcacattggagagggaagagtaggggccatgctgcttgggcttataatcttccggtatccctattctcttttttaaggcaagcagggattcccattgcgatcttgccgcctcttcaccccttcgcatcaaactgtcaatggcggtcggagtaaagctggcggaggaatatccttccacattcacacggatataggtatctgtgatatctacatttttctcatgattggactggcaggtaaggtcgacaatctgtcccagaatatcgggtgcactgttcagcttgtctgccttttttaaagcattctgcacatctactccgataataatatccgcccccatagctttcactacatctgccggataattgtttacgattccgccgtccactaataccatactgtctttccgtaccggagtaaataccccgggaatggccatactggcacgcatggcggtggagagtattccgtcatggaatacaataggttctccgttcactacattggctgccacacaggcaaagggaatgggcagtttattaaagttgatggagtcatgataccccattgtcaaatccgagaatagattggctagattctgcccttttacgattcctcctgaagctgcgtctttgggtgtttttgtaaaagggatggaaacaataaacctttcggaacgttcacgctccgttagtgacatggaactccgttttacccggtcgctcaacaagaatgtccaattttgctttcgcaccatgttgtccaactgctcaggtgtgtagcctatggcgtaaagccctcctacgatggctcccatactggtcccggctatataatcaataggaattccggcctcctcaatcactttcaaggctttgatatgagccatacctttggcacctccgccgcttaggactactcctacttttttgcgttgttgctcttgagaatgcaaagaaaaaggaaatattaagcaggttaataaaaccaatgttgaaagtatttgttttttcatcagacaggtgtttatatatactacaaatgtagggtatattttgtttagttgttgaattgggaaatggaaaaaatgttccaaaagtcggaattgtggattatttctacatatttccgataaattctacatttccgcatttagcatgacaaagtataatgagctgatagacagcgaataataaatgtaatgattttggcatactatttgcttgagaggaagatagaacaagcataagttaaatttaataataagattcgatatgagattattcttttcgaaacatgagttgaaactgagaagaaagagaaacattgctgctataatttgtgtggtaattgtgttgggggcgtattggatactaacccggcctcagaaggttgagccggaaatgccgacagtcattgtggaaccggtagttaaagatgatgtggaaatatacggggaatatgtcgggcgtatccgtgcccaacagtttgtcgaagtacgtgcgcgtgtggaaggttatttggagaatatgctttttgccgaaggtacgtatgtaaataagaatcaggttttatttgtaatcaatcaggatcagtatcgtgccaaagcggacaaggcgagagcgcagttgaagaaagatgaggcgcaggctttgaaagcggaacgtgatttaaagcgtatccgtccgttgtttgaacaaaacgctgcaagtcagttggatttggataatgcggaagctgcttttgaaagtgccgaagcaacggtggctatgagcgaagcagacttggcacaggcggaattggaattgggttatactattgtccgttctcctctgtcgggacatatcagtgaaagaaacgtggatttaggtacgttggtcggtcccggtggaaagtcattgcttgctaccattgtgaaaagtgacacagtattggtggattttagtatgacggcactcgattatctgaaaagtaaagaaagaaatattaatttgggacaacaggactctacccgttcctggcaacccaatatcactattacgctggcggataataccgtttatccatataaaggatatgtagattttgccgaaccgcaggtcgatcctcagacgggaactttttccgtccgtgccgaaatgccgaatccgaaacaagtcttgttgccgggacagtttactaaggtcaaactattgttggatgttcgtgaaggtgcactcgttgttccgatgaaagcggttaccattgaaaaaggaggagcatatatttataccatgcgtaaggataatacggtagagaaacgttttattgaattaggaccggaagtagggaataatgtagtggtggaaagaggactggcagcaggagaaattgttgtagtggaaggtttccataagttgacgccgggaatgaaagtgcgggtaagtcagcaggagatggaaacgaaggataacacaaaaggagaataggcgatgaaagttacgttttttatagataggccggttttttcggctgtaatctctatcgtgattgtgattgtcggtattatcggtctgacaatgcttccggttgatcaatatccgcagatcactcctccggtggtgaagatcagtgcttcttatccgggtgcgagtgcgcttaccgtatctcaggcagtagctactccgattgagcaggagatcaatggtacgccgggaatgctttatatggagtcgaacagttctaattccggaggtttttcggcaacggttacatttgatgtttctgctgatccggatttggcggcagtcgaaattcagaatcgtgtgaaactggcggaatcccgtttgccggcagaggtgatccagaatggtatttcggtagaaaagcaggctcccagccagttgatgacactctgtctgacttccactgatccgaagtttgacgaaatttatctgagtaacttcgctaccatcaatgtgcttgatgtgattcgccgtattccgggagtgggacgtgtctcaaatattggtagccgttattatgcaatgcagatatgggcacagcctgataaattggcgaatttcggtctgaccgtgcaagacttgcaaaatgccttgaaagatcagaaccgtgaatctgcggcaggtgtgctagggcaacaaccggtacagggattggatataacgattcctattacaactcaaggacgtctttctacggttgggcagtttgaggatattgtggtgcgtgccaatgcaaacggttccatcattcggttgagggatgtggcacgtgtttctttggaggcttcttcctacaatacagagagtggtatcaacggtgagaatgccgctgtgcttggcatctatatgttgccgggtgccaatgcgatggaggtggctgaaagagtgaaggaagcgatggcggaaattagcaagaacttcccggaagggttgagctacgagattccgtttgatatgacaacctatatttcagaatctatccatgaagtatataaaaccttatttgaggctttagtactggtggtgttggtagtatatctttctttacagagctggcgtgcgacgttgattcctgtagtggcggtacctatttcattgatcggaactttcggctttatgttgatctttggtttctctttgaatatcttgactttgctcggattgattcttgccatcggtattgtggtggacgatgcaattgtagtggtggaaggagtagagcatattatggaaacggaaaagctgagtccttatgaagctactaaaaaagcgatgaacggactggcaagcgccttgattgccacttcattggtattggctgccgtgttcgtgcctgtcagtttcttgagcggaattacaggacagttatatcgtcagtttacagtgacgattgtagtatccgtgctcatttccacggttgtagctttgacattgagtccggtcatgtgttctctgatcttaaaaccggatagtgggaagaagaaaaatattgttttcaggaaaatcaatgaatggctaggtattggcggtaataaatatgtagctgccgttacccggactatcaagcatcctcgccgggtgttgagcgctttcggtatggtgttgatagccataatgttggttcatcgtattattccgactagttttttgcccgtagaggaccaggggtacttcaagattgaattggaattgccggagggagcaactttggaacgtacgcgcatagtgaccgatcgtgctattgcttatctggaaaagaatccatacatagaatatattcagaatgtgacgggaagcagtccgcgtgtaggcagtaatcaaggacgtaccgagttgacggttatactgaaaccttgggaagagcgcaagaacacaagtatcgaaaagattatggatacagtggagagacatcttgaggaatatccggaatgcaaagtctatctttccactccgccggtgataccgggtttaggtacttcgggaggctttgaaatgcagttggaagctcgtggggaagccacttttgacaatctggtggatgcggcggatacattaatgtattacgcttctaaaaataaggcattgacgggtttgtcttcttctttgcaatcggagataccgcagctctattttgatgtagaccgggacaaagtgaaaatgcttggtgtacctttggctgatgtattttctaccatgaaagcctataccggttcggtatacgtaaatgacttcaatatgttcaaccgtatatataaggtatacattcaggcggaagctccttaccgtgagcataaggataatatcaatctattcttcgtcaaggcctctaatggagctatgataccgttaacatctttagggaacgcttcttataccacagggccaggtagtatcaaacgcttcaatatgtttactacggcagtcattcgtggggcagctgcgcaaggatacagttccggacaagcgatggagatcatggaacagattgctcgtgaacatcttccagacaatataggtttggaatggagcggactttcttaccaagaaaaacaggccggaggtcagacaggcatggtgatggcattggtattccttttcgtatttctctttcttgctgcgcaatatgaaagctggacagtacctattgccgtattgctttctttgcccgttgccgctttgggtgcttatcttggggtatgggtatgcggattggagaacgatgtgtattttcagatcggtctggtcatgttggtggggcttgccgccaagaatgcaattttgattgttgaatttgctaaagtgcaggttgacaagggagaagacttggtgcagtcggctatttatgcggcccgtttacgtttccgtccgatcttgatgacttcgctcgcgtttgtgctcggtatgcttccaatggttttggctagcggacccggttcggcaagtcggcaggcaatcggtacaggtgtctttttcggaatgatatttgctattgtattcggtatcattcttgtaccgtttttctttgtgatggtatataagacgaagtctaaactcttaaaacagaagaaatgatgaaacgaaagaaactatatattgtcatattgttatttgtaggaatattgacttcctgcaaggtaggaaaaagttatgtccgtcccgatcttcatctacccgacagtttggctcaacatcaggactcagttagctttggtgatcaggactggaaagatatttatacggattctacattgagaagcttgatagaacgggcattggatcataataaggatatgctgatagctgctgcccgtgtgaaagagatggctgcacagaagaggatttctacggcagcattgcttcctgatataaaagggaaagtgacggcagagcgtgaactcgaaaatcatggaggagaggcttttaagaggtcggacacctttgaagcgcagtttctagtctcttgggaacttgacctttggggaaatttgcgttgggcgcgttcggctagcattgcagagtatttacagtcggtagaggcacaacgggcactacgaatgactattgtagcggaggtggcacaggcatattatgagttggtggctttggatacggaattggatatcgtaaaacaaaccttgaaagcccgtgaagaaggagtccgtttggctcgtatccgttttgccggaggattgacttcggagacgtcgtaccgtcagtcgcaggtggaattggcacgtacggcaactttggttccggacttggagcggaagatttccttgaaagaaaatgatatagcttttctggcaggtgaatatccaaacaagattgcccgctcacgtttgcttcaggaatttaagtcaccggaaacgcttcctatcggattaccgtccactttattggaacgtcgtcccgacatccgtcaggctgaacaaaagctgattgcagccaatgctaaagtaggggtggcttatacgaatatgtttccgcgtcttgccctgacaggaggatttggctcggaaagcacgtctctatcggaactgttgaaatctccttatgcggttatggaaggggctttattgactccaatttttggctggggaaagaaccgtgccgcactgaaagcgaaaaaggcggcctatgaagttgaagtacgcaattatgagaagtctgtattgcaggctttcaaagagacacgtaatgcgatagtgaatttcaacaagataaaagaggtatatgagcttcgtgcgaatctggaacgttcggcgaagagctatatggaacttgcacagcttcaatacattaacggtgtcattaattatctggacgtgttggatgcgcaacgtggatatttcgatgcgcagattggcttgagtaatgcgattcgcgacgaattgataactgtagtacaactttataaggctttaggtggaggttggaaacaaaatccctaaacaaaagaaagaagaattttcataattcggaaaaaagtgcgaaatttgcaacgcttttcaagtttgataagaaacttactaacacctttaaataaaaatagagaaaatgactaaaagtgcattgcaaatcgcaagggctgcttatcagcccaaacttccaaaagcattggcatcaggagctgttaaagcagtggtaggtactgctactgaatctgtagccgatcaggaagctatcaaagctttgtttcccaacacgtacggaatgccgttgattacatttgaagccggtgaagcggtagctcttcctgctatgaatgtaggtgtgattctttcgggtggtcaagctcccggtggacacaatgtgatttccggtttgtttgacggtatcaagaaactgaatccggaaaacaaattgtatggtttcatcttaggtcccggtgggttggtagaccataactatatggagctgactgctgacatcatcgatgaatatcgtaacactggtggtttcgatattatcggttccggtcgtacgaaattggaaaaggaagatcagtttgaaaaaggatttgagattatcaagaaactcggtatcaaagcattggttatcattggtggtgacgactctaacacaaacgcttgtgttttggctgaatactatgccgccaagaagtatggtgtacaggtaatcggttgcccgaaaacaatcgatggtgacttgaagaacgatatgattgaaacttctttcggtttcgatacagcttgtaaaacttatgctgaagtaatcggtaacatccaacgtgactgtaactctgcacgtaaatactggcacttcatcaaattgatgggtcgttcggcttctcacattgcacttgaatgcgctttgcaggtacaaccgaacgtatgtatcatttcagaagaagttgaagctaaggatatgtctttggatgatgtggtaacatacatcgctaaagtggtggcagaacgtgctgcacagggacataacttcggtacagtattgattcctgaaggtttggttgagttcattccggctatgaaacgtctgattgctgagctgaatgacttcctggctgctaacgcagaagaattcgctcagattaaaaagtctcaccagcgtgattatatcatccgcaaactttctccggagaactctgctatctatgcaagtctgccggaaggtgttgcccgtcagttgactttggaccgtgaccctcacggaaacgttcaggtatcattgatcgaaacagaaaaactgttgtctgaaatggtagctacgaagttggcggcttggaaagaagaaggtaagtatgtaggtaagtttgctgctcagcaccacttcttcggttacgaaggacgttgcgctgctccgtcaaacttcgatgcggattactgctattctttgggttacacagcttctatgctaattgctaacggtaagacaggttatatgtcttctgtacgcaataccactgctcctgctgccgaatggattgcaggtggtgtgcctatcacaatgatgatgaatatggaacgccgtcacggtgaaatgaaaccggttatccagaaagcattggtaaaactggatggcgctcctttcaaagcatttgccgcacaacgtgaccgttgggctattgaaacggattatgtatatccgggtccgattcagtactttggtcctacggaagtttgcgaccaggcaacaaagactttgcagttggaacaacagaaataattttaactgttagcggttaacggtaaataattaattaacgatggacggtaggtgtcgtatgacagattatcgttcatcgtttttcactaacccttaatcattcagtcatttgtcgtcacgtaataatccgatagctgcagttcaaaagaaaaagactgcttccgccactcgaaaaaagggaactacttcttctaaatcttcccgtgctccgaaaagggtgcagatgaagacgagccatggtatgcctgtctggttgcgtaatattctggcagtactgattgtgggttgtttctctgttgctttctattatttctttatccgcccttatgcttatcgttggaagccttgccacggattaaaagaatatggagtttgtattcctgacggctacgatgttcatggaattgatgtttctcattatcagggaaaaatagactggcagaaacttcggcaaaacaaggagacagtgactcctttgcattttgtctttatgaaggcgacagaaggaggcgatcatggtgacactactttctcggcaaactttgccaatgcgcgtaatcatggatttatacgtggagcttatcatttttatattccgagtacagatgctttgaagcaagccgacttttttattcgtacggtaaaattggataccggagatttgccccctgtgcttgatgtagaaatgaccggaagaaagaataagacagaattgcagcaaggtatcaagcgctggctcgaccgtgtggaggcttattatggggtaaaacctattctttatacttcttataaatttaaaacccgttatctggacgattctatctttaacgcatatccttattggattgcccactattatgtggactctgtgaaatatcaaggtaaatgggatttctggcaacatacggatgtgggaaatgtacccggcattgaagaagaggtggatctgaatgtcttcaacggtacattggaagatctcaagaagctgacaataaaatagcagctgtttctttttcaaacaacttatctattctcttatttgttataatcgtattattattaaaaatatacgattatgaactttgatatagctattattgatggaatgagccgctttgatccaaagattcatgttgtgatagaaggagcggagtttgccgattatttttggcctgctgtcgaacaatatgtggaatgtacgcatgaatattggcgtaggactttatcattctcaaaacatagaaggcgctttgaccactttgcccggagcacgtattgtatgtccgtcttttgcggatgatgcagccgggctactccgtacctgtatgcgttccaaaggctttactttattccttgagccgaaagcattatataattccgttgaggctgctgcagtcgtaccggaagattttgaagttcctttcggaaaggcacgtattcgtcgtgaagggacagatctaagtatcattacgtatggaaatacaacgcatttctgtctgaatgctgcggaacggttggagaaagaaaagggatggaaagtagaggttatagatatccgttctttggttcctttggacaaggaaacgatattcgaatcggtgaaaaagacgagtaaggcgttggttgtacatgaagataaagttttctccggctttggggcggagcttgccgcaatgataggtggagagatgtttcgctatttggacggacctgtgcaatgtgtcggctctacctttacacccgtcggtttcaatcctattttggaaaaggagattttgccggatgaagctaagatctatgaagcagccaggaagttattagaatattaaacagtatggattatgaagaagataggtttgttttatgctgccaaagctgggaaaacgagttgggtggcggaaagaatacagaaagaattcggtgaaagtcatataaaagtggtaccgatagaacaggcttggcagaacgattttgctgcttatgattgttttattgtcggagcctccacttggtttgacggagagttgcctacttattgggacgagctgttgccggagcttagaacgatggatttgaaaggaaagaaggtcgctatctttggattgggagatcaggtacgctatccggaaaactttgctgatggtatcgggctattggcagaagtattcgaagaagacggggcggcattggtgggctttacttcttcggaaggatatacttttgagcgtttcagagcattgcgtggcaatcagtgttgtgggttggttatcgacttggataatcagtcggaccaggcaaaaaagaaaatcaaggattggtgtgaacaagtaaaaaaggagtttgcgtaactccttttataagctattatatattatgagggtgtcataatgaatgatctgcgttttgacactctctatttttatccctgtattctttgtttctgttggcagagaatagtattaaactttataaatgaatttcactgccgcccaacgattcttttctttgtgatggatataagtcagtccgtttttttccgcttcttcgcggataacagggatgtcatccacataaaatccgctcatgtatagttccgctccgggatgcatacaagtgacatattgtttcatatcattcagtaggatattgcggttaatattagctatgactacatcaaacggcccttttccggaaagtgaagaggcatctccttgagaaacggcaatattatctacgtggttcaattcgatgttttcgatagagtttcgtacacaccattcgtctatgtcgatagcggtacatggatgtgcgcctttcattcgtgcaaggatggcgagaatagaagttccacaacccatatccagcaatgatttatctttcagctcgctatccaacagttcttcgataataaggctggtagtctcgtgatgtcctgtgccgaaagccatttgcggattgattacaatatcgtattctgctttaggaatatcctgatgaaatgtactgtggattacacaacggtcaccgatgataatcggttgaaagaaattcttttcccattcctcgttccagtccttgtcttctgcttctgcatatgtataggtgatttccgtatcggataggggaaatccggcgattgcattctttatggaggtttcgtcacataaagtttgttggatatatgcggttaatccgttctcattttcaacaaaactctcgaaaccggtttcgcctaatacggcagctaatacatcatttacaatctctgtggacggattcgtatgaaaagtgaactcaaaatacttcatagttgtttctaatgctggtgaataatgtgcaaagataatcacaattttagggaaatccctactatcctttggggaaaatctccccaaggcgataaatctcttccttatctttgtaacgtgaataagtttaagtaattacataaacccagatgatatgaaaaagattgtttacttcttgctagttgccttgtgtctcccgataggcttgatggcacaaagcgttgatgacgacctttacttcgtaccttccaaagacaaaaaggagaaaaaagaaactccggtgaggaaggaaccgaagaaacaggtgacaaacatctatacttcgccgggaactacagttgtggttcaggaccgtagggggagaacgcgggatgtggatgaatataaccgccgttacgatgcacgtgataatgaattcgtaatggataatgataccttatatataaaggaaaaatctactccggacttggacggggaatgggtgaccggtgaattcaatggtacgcaggacgactatgaatatgccgaacgcatcatccgtttccgtaatccgcgtttcgctatcagtatcagcagtccgttatattgggatgtagtctacggaccgaattcttgggactggaatatatataccgatggtatgtatgcttacgcattcccgacattcagtaatccactttggtgggattggcgttatggctcatacggctggggctggaactatggttggggctggagtcgtccttattatgcttggggatattatccgggctattggggcggctggcatggcggctactggggtggttggtatggtggtggatattggggacatcatcatcattggcacggcggtcctagctggggctggggcggtggaggccgttggactggtccgacttatacaaaccgtcgttcgtatggacaaagcagttacagaaattcttctactgtacgtcgatatggttcaagcgccactcgttctggtggttctgctattcggtcaactggtagctcgtctcgtacctccggatcagcttatggcaggggaacaagcacaacaagacgcgtggtaggtacgcgttcttcggatgagcgttatggctcaagtactcgtacgggaaattcatcacgtcgtggcagtatttattctcggccaagtagtactcggactagtggaacaggaaccggttcttcttattcccgttcttctggagtgagaagtggcagtagtggaacgagaacatctacttacaatcgcggtagttcttccactccacgcagcaactattctaacggtaatagtagccgtcgttcatcatcttatggaacttctcgttcatcatcttcccgcagttattcacctgcctcttcaggtggtagttcgcgcggcagctattcttccggtgggggaatcggcagatcttctggcggaggaggttcttctcgtagcggtggtagaagataaaacgaagggtattaattaaatggaatgaaaggtatgaaaaaaatagttatggtagctgtattgggactatttgtttctgcagcttcgggattagcacagactgtttatgatggtgctaaactgacgggaaaagatttaaatggaactgcccggtttgtcggaatgggaggtgctatgggggcacttggtggagatatttctaccatagggaccaatccggccggtattgggctctatcgtagcagtgatataatgacttctttcggtttctcatcttatggaagtgaaagcaagtatttaggcagtaagtggaattcggataaaaacagggcttcatttgataatatcggatttgtattttcatcaaagatcggaaacactactcccttacgctatgtgaattttggatttaactatcataaagcaaagtctttctataagaatatggaaatgaacggtgatcttggtaattattcacaggccttcttgatggcttctctgtctgacggaatatcaaattggggaaatccgtttgatactaatgatataggttggctttctgctgtgggatatgaggggtatgtaatcagtccgagccttacaactacgcagaatgaatttccgtataaagataaggaaggtaatcaagtagtaaataatgagggaaagcctctgttttatgattatgattattataatacaatcgttccggatggagtaagtccatacgcacgctttcattcggaagaacgtggtggcatagatcaatatgattttaatatcgcttttaatttcagtgaccgtttttatctggggctaacaattggggcttattccattgattataataagtacacctcgtatgatgaagattatggtaatgaaacaggatataaactgcaaggttggaataaaattaccggatcaggttttgattttaaattcggagcgattcttcgtcctttcgagtattcacctttccgtataggtttggctattcatacacctgttttttatagtctggattataagacaagtgtttttatgcaatcagatatttgggatccggtagccaatgagattacctatcgtgatatagattctcgtgattatttgcctggtaaagatgatatggttcagcgctttcgttttcagactccgtggacttataatgtaagtttgggatatacggtaggtaatagtttagctttaggagcggaatatgagtatcaagactactcttcaataaaatttagagatcctgatggatatgcttccgctttcgaatgggagaatagtacgacacctatgttgaaaggcgtgcatacagctcgactaggtttggaatataaagtggtacctcagtttgcttttcgtgcaggttataactacagttcggcggcatttaagaaagacgcttataaggacttggcaataaattctattcaaacggatacggatttcgctaatagtaaatcgctgagtaactatacgttaggtattgggtatcggggttctacattttatgctgacctggcatataaattctctacttataaggaagatttttatccattcattaatgtaactgtggatgatgaaggtgttttaatagcttcaccggacgctacgaaagtaaccaacacccgtagccaagtcctttttacagtcggtatgcgtttctaaaccagatcagttttcaatttcaataataacttttgtgtgtaaagaatccctggaatgctgagtgtctacagcacttccggggatttctattagtcgtccggtatgaacggttgtccgtctaatactctattttatcctccttgttcatccatgctttgaaagcggaaatagcttcctcgtgcaataaaatctcagaaggaagttttctctcttccggtttcagttccagttcatcatagatgaaggaatcatcgaagccaatattttttgcgtcggttttattgttgccatagtacattttgtccaaccgtgcccagtaaatggcacctaaacacatggggcaaggttcgcaagaagtatatatctcatagccgctaagattgaatgtaccaagctttgcagcggcagcgcgtatggcgcttacttcggcatgagcggtaggatcgcaggaagcggtgacacgatttactccggtggcaactatctctccctctttagtggcaatcacagcaccgaaaggacctccaccgttctcgacattctcctttgaaagctcgatggctttccgcatcaattcttctttagtcatggtataaaatagattgttagtttaatatgaggattatattatatctttccaagaatcttatccattacccagttggtcagtgtcgcactttcaccgtcgcaagaacagatagattttcccaataaatggtctactaccgcttggataagaggttgctgtacatgttccgggttgccgatacagatttcttcccttcctttttctgtgtgcaggccgataggttcgtaagtgaagacagaaaaacaaatcattcctttgtccccaataatctctatacggtcttcgcgagctgaatcatgagctacaaagcaccaggaaccactgcctaccaatccgttatcgaactggaaacaagcgctcaacgtatcttcggcaggataaagcccgccgcgattgctcttgtagccgtttgcttcgaggatacatccgaacatatcctgtaataaatcaatctgatgcggagcaaggtcgtagaaataaccaccgcctgcaatgtcagcctgtacacgccagggaagattttcacggttataatccaagtcacgtggcggttgggcaaaacggatctgtacattgattacgttaccgatagttccgttttctaccaattcttttactttctggaagtagggaagataacggcggtagtatgcaacgaaacagggaactcccgtttctttggatatgcggttaatgcgcgtacattcttcgtatgtgacggccatcggtttctcaatataggcaggcttacctgctttcatcgacatgatggcgtatgtagcatgggatgagggaggagtagcgatatagatagcattcacttccggatcatctataagttcttgtgcatcgtcataccatctcttgatacctctctctttggcgtatgcttttgctttcgcaccgtcacggctcatcacggctactacttccgaatgttctactttttggaaagcagggccgcttttagttttcgtcacttctccgcaaccgatgaatccccacttgattatcttttcactcataatacaattacctatttgcttattctaataaactccaaagataaagcaattttttgtcaagagcaactttattgattattaacttagtggaggaatttggaaaataaagcctctattttgctaaaatggagatgttgtttgtatggaatagattttccgtttcgggtggataggacctttgctcttgtgaaagcatatcctatttgcagtataaaggcaggtgagtagagataagcccggggatgaaggacaatatgccaatggggaaaaagtataggattgttttcgtttagtaagtagattgataaggttattttttatcatagtatttcttgtaaatcttttgatattcttcttccttctggaatctatccaaccatgcattcaaactgtcgagtaagacaggtgattgtttgctgactgcccatgagtagaattgtgtgaaactgattgccgtattgatatctatttgcggcaaagaatcagcggcagcctgtgcgatactttcatcacatacggcatagtcgatgtctccatgtgccacaagcgaaatcaattgttccgggccgtatttttctatttcctttatataaatggtatctccaatctcatttcccaagttctgaatacgcaagattgacggggaaccctttataacatggagtgttttttgcgctaaatccaattgactgcgtatgtaaagggaatcgttttctacggttgctttccgttgtaccagcacttgtttgttgagcacgatgggagaggtgagcagtaaggaatccttcaatttgctggttgctaatataccgtatgctattacgtcataacggtcctcgctcaatcctctcagacgatcctcaaaactcatataagggctgatgtcaactcttagtcctttatctcggccgaatgcctgtatcagttcataattaaaccctgcaaccgtatccccgtctacataaaaactgatggaattatactctgtcgctacacgtaatacaccttctctgataatatctgcatagtcgcgtgggggaagcggttgtttttgctgattgtcgcatcgacggaaacagaagagtagtgccagtacgataattacaggtatcagatatctaagcaattttattttggggcgtgtcaccataagctgcagaagttttatcaatcatagaagttccatgaaaggccgaatttcagcacacgtgggttgatagggtaatgaggagacaggaaataattcggtctgctcattccttgattcacgtgatacatcattacatagaaacgtgtacgctttaaatgtaagttcgcgtaaacatttacaataggatagccgcctatctctacctggtcgtctgtcggttgcaggtggaagttctgaatggcgggcatatatgcaggggcattgtatttggtaaagtatctcagatcggcacctaattgtacgctgagcactttttttgccagtttgaactgcatataaaagttatgatatagcgagaggtccggcaagggaagcacggtttggtcgctggacttctgccaggtcacctcattgtccaagtggaagatacccaatttgaagtcctgattaagacttgctgacaacacttgcagacttccgcttttttgttcgggcaatgcttgttgattgaaataagtatagttctttatattctcgactcctgctttcaattttgtcctccagcgggcaatgctcaactctccttcaatgcgggtgcgaaactccttgtccatatcattgtcccaccagaaatgcttggagtgatagtggcgcatatagaacggagccagtttattgctgacctctccacgggctataagactgaccgtatctttccacagaggaaagttcaggtctatatcgcctttcacattgaactgtccgattgcttttcctcccagtcccacttcaccgatggcatgataatggagtacattaccttcacgtttggacaattcgcctcctacgaatatctcattctcattgtatttgtcattacctatgccttccaggttcatcagtgtatatttgctgattttataagaggcaaatgccgtcagtccggctttggcatatttattgaacccttctaacagagcaatacctacggtgtttttgattcctatataggtcgtactgtcttttactaatggattatcaggttctaaataagtgttctgatagtaatctttcacgtcatcttcagaatggaaactatgccgtgcacgttccacttgaacggtatgtataaaactggtgaccggaacgaattcctgtttggcgggcatggtgtcgttttcagcctgtggtatatcccgtttgaatcccaagttatagcgttgagtcagaaaaacgtaaaagtcgtggttacggttggtcgtagcgcttagtatggtaggaatattcgttgattcatactccctttgaccttgtgccatttcctccggtgcagtgatatatcggtcatcttcgatacctccgttctcgtttgttttcagatagttattgctgtatatggcttgcatttggtagcggtcgccgatataactaccgaaaaaagctgcattgaaatgtgatgtgctttgattattgtaatatccccgtccgtacagatagtctatgttgaagccgaaagccagacgtttgtttacattgacagagaagtatgatttgaaacgttcttccccgttcaccttgttaccggctttgtgatatgtcagattggtataaggtacgttactgttcgtaaagttgaattccgtaggacggataaagaaactggagaaaggctccatgaaaatagttggctcagggtcacgacggtcgaaaaaaatacgtgacatacggggagaacccatattggccagataattgtaatgtccggtcagcccgtcagtcaggttcgtgttctggaaatgatgatatgccgtatccgccggaatcatagtccggtcgcccaactggtttttgatacgccacatatataatttaggaggcaatccctgtatctcaacatttgcactgtccagtttatccggaatcatggcagggtctacctggttgccgtattggtcatagccgttttcgtcaattacctggcgaccattgtcgaactgtgcatgaacacttgtcagacctataacggtaagtaatatatataatagtaagattcgtctcataattggaggcaaagatacttactttaattgatttaatgataatggataattgaaaattatgttgcatacgtacaacacgtagctaataattatcaattatccattgttcactatccattaattaaacttctcggataagctccatgcctttcttgatagcttcctcgttcataggaatcaagtggtggtggcgttccggcaaagtctttttcaagcctttgatgacattttctaaagtaacaatcggacgaagtttcagcagaccgcctaatacgatcatgttgaacgctttagcgttgttcatttcgttggctgcatccattgcgtcaatacggtatactttgatgtctttgcgggtaggagggttgattattccgtaaccgtcataaatcaagataccaccgggtttcaccttactttcaaacttttcgagtgaaggctggttcaagatgatggcggcatcgtatttactaagaatcggtgaagatatcttgtcatcgctaacgattactgtaacgttggcagtaccaccccgttgttctggaccgtatgccggcatccagctcacttccttgccttccatcaaaccggaataagccagaatcttacccatagacaatacgccttgtccaccgaatcctgctataattatttcttctttcattgttctgttgacttttagcgttattctttatcttttaaatcacccagcggatagaacgggaacatatgttcttccatccatttgtttgctttttccggggtcatcttccaaccggaactacaagtggaaacgatttctaccaaattggaacctttaccgttcatcgagttctcgaaagccttgcgaatagctttcttcgctttacggatggccggtaccgattgtacggactggcggcttacgtaagctgttccttccagttgggcggcgatttctgtgattttcaatggatagccgtgaagttcaacgtcacgtccgtaaggacaagtcgagctcttcatacctactagtgtagtcggggccatctggccgcctgtcataccgtaaatggcattgttgataaagataatcgtgatgttttcgccacggttcaaagcgtgtatagtttcggctgtaccgatacaagccaaatcaccgtcaccctggtaagtaaatacgaggcgatccggccacagacgcttcacagcagttgccacagcaggagcacgtccgtgtgcagcttcctgccagtcaatatccaaatagttataggcgaaaactgcacatcctaccggagagattcccaccgttttatcttccatacccatctcctctattacttcggcaatgagcttgtgtaccacaccgtgactgcagcccggacagtagtgcatggcgttgtcgttcatcagagtcggttttttgtaaaccagattctcgggtttgattatttcttctttagtcataacttcttctccttatctgttggtgaaccgtataaaaaactccatcagcttgacaaagattgccgcgccgcatacgtagataaacattttgaaatcttcctttcctacaacgaaataggtgataatggctgcaacagccagaatcatgaaaaggatgttcagtacgtttcttattttatcgggattcatcgtttcgttatttgattattttttcttccaaagcagttacaatttcatccggatcggggacgataccgccgagacgtccgaaatgctctacctttattttaccgttaacagccaggcggacatcttcaatcatctgtccggcattcagctccgtaacaagcataccttttactttgtcagcataagcggcaatggcttttgtagggaacggccacaaagtaatcggacgaaggatacctaccttgatacctttctcgcgagccagctccatggctttctgaccgatacgtgccattgagccaaaagcaataatcagatattctgcatcttcacagtttatttcttcaaaacgtacttcgttttcttcgatttggcgatacttagcctggaagcggaggttgttgatttccattgcttccggtttcagttccaaagaagtgatgatgttcggtttgcgatctttagcctttccggtagcagcccacggacattgctcaatcacttccgcttctgtgcggcgtggcttttgtgcaggaagaacaaccttttccatcatctgtccgatcacaccgtcagcaagaataatggctggattacgatatttgaaagccagttcgaatcccaatgccacgaaatctgccatttcctgtacagatgccggagcaagagcgattagcttgtagtcgccatgaccaccgcctttcacagtctggaaatagtcggcctgactcggttggatggttcctaatccgggaccgccacgcatcacgtttacaatcagacaaggaagttcggcacctgcaatgtaagatataccttcctgtttcagactgacgcccggacttgaagacgatgtcattaccatctttccgctgcctgcgcctccatataccatattgatagctgccacttcactttctgcctggagtactaccatgccggttgtttcccacggtttcagttcagcaagtgtttccaacacttccgattggggagtaataggataaccgaagtatccgtccgcaccgcaacggatagctgcgtgggcgatggcttcgtttcctttcattaatacaacttcttctgccatattcttttcttttattctacttttactttatacactgagatacatccgtccggacaaactgttgcgcacgagctgcatccgttacaggtatcttctttcacttgccaggcatagttatagcctttcatgtttacctctttgttgagggcgattacatcaagcggacacgccactacgcataggttacatcctttgcaacgctctgtgtcgactacgattgctcctttgatttttgccataatctttattttattacgttatctttgagtacggttattgattatacatatctttgtgatagaagtttagaatatctatcgccattttccgggcctgaacagcggggctgtcaggattaaggtcgatagcgtattggtaattgtccagcgcttgcttccagtctccttttttccggtaggcatttccccgtaaatagtaaagaatatctttctcgttttcgacagaagtgtctaggagaagttggttcaattgctcaatcgctgtgtccacatccccctgattgataagctcttttaggttttctatttgctccatttcttttgtctttcgggattctgaaacgcaaagatagtttttatttgtgtaaatgagacaaatgaagccggaaatttgtatttgggaaaagactttcctgtggatattgttatgctcacaaggatgaatgaaataaaaaaagatcttcaccttttctctgtatcgacctgtttatcggaattagcgggtgaagggcaatcttttcacctgctgtttcaccttccttgaatccgaatcaaatatgcggtcgctttagtctattgtattggcaatagactgctggaagactaatggataacttcgtgtgccttattagagaaactccttgttagtatagacaaagttgtatttcattagacgtgttctataaacaaaggcttcgtttgtgaaaacaaaggtttggtttatataaacgaagccttcatttataaaaacggaaccttcgtttatagattgtttgtagtagaaagcaagttaggttgtaacaaaagtaagtttagttggattgaaaagtaagttctactataatagaaacatagagagttagtatattatcggattgtatgggtgaggagaaggtgaaagagctgctcttcacccgcaaatattgataaacaaagcgtttcagcgaaaaggtgaagggcatttgagacaggaaaaagtgtgtaagttgtaggggtggacaacaatgaagaattagatttttgcaaataatagcagaaataagggcagataatctttcaattcatttcgcataagctccattgttttttgtttgtaccgattgatggacttcacgctaagattcatttcttccgcaatttccgtatgggtctttccttcaaagaaactttttataaataccgtgcgataactttccgggagtttattcagtgtttcgtacagcattctgtataattcgtcaagggtatatacgctgtccggttccacttcgtaaatgggagctttcttttgaacaacttctgcatagttccattcatactcttgatgtttcagataattcaggcagctgttttttacacacattttgatatatcccaatgccgtgtccgattgaaaatcaaaagaatctattttatcccatagtgaagtaaatacatccgaaacaatatcttcccgtgtctctttatcatcaataaatctttttgcatataggacgaatggagcataaaactcttcataaagttgcttgaaggtctgttctttaggctgtttttgaaaagatattttcattattttgagattctgttgtttttcatttcgctgcaaatatataataagataatcgctaaaccttaatttttctatttctttttttattcttttgatgagaaatttggaaataaaataaaaaaaatccgtttttcctgtcccttttgggaagctttgattgtattataaatataattgcaattaacagataaagattttgaaagaaaatatgaatccggaatcattgtttcgcaaagcacaggcattgggagatgatattagagaaatggagtccatcgatacattggcggcctatcataaagcgatatttgatataaataaggtagaaagaaaaaagactgtttatagtcagttgatgcgatatgcggcattattggctattcctcttttaatgacatctttggttctgggatatttatattttgctggagcggaagaagaagtaaagtatgccgaaattacggctgctaccggttcggtgatacgttatgagcttccggatggttctgtggtgtggctgaatgctggtacgactttacgttatcctacggtcttcaaaaaagataatcggagtgtagaactgaaaggggaggcctattttgagatacaggcagatcaagaacgtcctttttatgtaaatacccggaatggattgagtgtctatgtttatggtacaaaattcaatgtaaacgcttatgaaaatgacgattatgtagaaacagtgttggagaaaggtaaagtaaatgtgataacccccaatcgggaaacaatagttttgactcccggagaacaattgctttacgataaacagagtcagaaatcggtaaagaataaacctcaaatccgcaactacgcgcctaatatgatacagaagcgaaaagaatctgcatcgttagtaaaaagggggcacagtgcatcgaatgtcaccataaagacatataaatgccccttaccccaccatgcgacttgaggcaatacgcaaaatcacgactataagttgtcggtgttatccaaagtcattctggaacacattggcataagcattgttgcatgaatagatattcagcacatacttccttgatgtcctgacccatttggctggcacagagatgaacttaaagacaaacgtcttgatgcggcttgttgctttgagtccgaacctcttcacgtcaagcctcgccatgatgaatttatagaagttgcgtatgagtgccataagcagaagaaacaccgtgttttctcccataaaggattttggaagcctgttccagccgaatccgttattcatatcatcgaagatgcgttccttccctccacggaggttatagaattcgacaatctctttctcggaagactcgtagtcatttgtaaggatgcagcggtaggtgtattctccttcccacaggtcgagttcgccgtctatccgcttctgtctttgaatcacaagacggtatgccttccctttccatttctcgatgagaatggaggccagctcaaactcaatgccgcccaattccactttcttccaacctctgagggcaaagatgtcattgtagagcgaactgcatcggttagcacggatatagaaggtcttgcagtgtttagcaatctcttccactatctcttcagaacacgagccgcaatcagctctgaaacggttgataataagcttgttttgttcaaacctttcaaagaacctcttcagcgtgtccttctggtggaaacggacatttgtgttgccgtcgctgttctcaatgccgacaatcaagttgccaataaccgccacgccagggcgataaccaaggaacttcttgtatgtaggcttcgcatcaaacttctcagcctctatgaactggtggtcgaagtcaacgtcatacccctcgccctctttcagctgccctgtggacaataggcaattgaggagcagtgtattcagcttgtctgccgtgttgaagtcgtaggtcttgccagtgtcggatgtgtaggaaatgttatcctgggtcagttcctttatggctctaagaatcgtgtcggcactgcatgtgcgaagtgtcggatgaagcgaaaggtggtacatcagatgagtggtgacatcctcgatgcatgagccgccacaaaaataaacgctcataagcgaacggatgatttcgctgtattgataaccatacagcctgcatctcataccgagggttgagtcgattacagatgagagtctggagtcaaattgctccattattgaaaatattcctccaaaaggagtgagtttctcggatttaattgctacctttgccatgtctgtcgggtttgatacatattttgatttgcaacactaagataggtgaaaaatctgacatggcaaattcctgagcaactttttgttgctcaggtacttaaaaagttatatttgtaatagtgttgcggaattaaggataaagtagatgtttatggaaagatagcttggaaagatggaaagttagtttttagaaatacgccgttagaggaaatcttcaagagattggaacgacatttcaatgtggatattcaatataataataggtgtgaaaaagaatatagatatcgggctactttccgggatgagactttgtcgcagatattggattatttggctaaatctgcaaaaatgaaatggaaaattgaagaatctcagcaacaagctgatgatacgtttacaaagaaaaaaattatagtggatttgtattagtagtaacctttaaaaatagaatagcctatgagatacacgcattaaagatgaaaaaaggaagaaagttgctgccaacaactgtcttcctcagaaaacagattcacggtatggggtcttgcaaacactaaccggaatcaaaccatagttcatttagtaataaactttagttagtcgcaaatgtatgaaaaaaaatcattcatttattgcattatgttctaaatatgctttaaatctaaaacttcctttaattatgaggatcagtcttacactacttttcctagtggtattacagctttctgctgaaaatagctacgcccaacgaatgcgtattgccatttctatgagtaatgtatctgtagaacaggtactgaacaaaatcgaggagacttctgactacgtattcctctataatgatgagacgattcaaaagagtcgtattgtatctgtaagaagtaaatccggaaaaattactgatattctggatgatatattcaaaggaacggatatatcgtatactgtgattgataaacaaataatattgtctaaatcaaataaagttaaccagcctgctaaggctattcagataaaaggtacggtaaaagatgccttgggagagccgttaattggtgtcagtgtattggtgaaaggtacttctaacggtacggtgactgatttggacgggagattttctttgaatgtttccgttggagatattcttgaattctcgtatgttggttatgcagctcagtcggtaacggtaaaaaatgcgaatccgttggatattgtgttgagtgaagatgcgcaagctttggacgaggtggtagtaaccgcattgggtatcaagagagaagctaaggctttgacgtacaatgtgcaggaaataaaagcagccggtattacaaaagtgaaagatgctaactttgtaaatagtctttccggtaagattgcaggtgtgactatcaatcagagttcatcgggaaccggtggttcttcccgtgttgtcatgcgtggaacgaaatctttgtttggtgaaaataatgcattatatgttttggatggtattccaatgcaggggttaaggaccaaacaatccgataatttttatgagtctgttgaagtagctgatggtgacggtatatctaatatcaatccggaagatatagaaagtatgtcagttttgactggagcttctgcagcggctttgtatggtaacagaggagctaacggtgtgatattgattacaaccaaaaaaggtgcaattggaaagcctagaataagttactctaacagcactagtttctcaagacctttcgttactccggaatttcagaatacatacggacgtaaggaaggtgaattcaagagttggggagataaattggagaaaccttctacatataacccattggacttcttccagactggtttcaatacgatgaattctattgccgtatcgaccggaacggaaactaatcagactcatatatcttttggagctgtaaactcagagggtattattgacaataataaatacaaccgttacaactttacattccgtaattcttgggatattgtgaagaatgttttgagtatggatatgggattattctatattaaacagaataatcagaacagtaatgggcagggtatgtattataatcctttggtaccaatttatttgtttccaccaagtgacgatataaataaatatgctgtttatgaaagatatgatgccgacagaaatttcaagactcaatattggccttatggtaatcagggattgggtatgcaaaatccgtattggattatcaaccgtaatatgttcaataccgacagagatcgttatatcatttcattgtcaatgaaatggaatataaccaattggcttaatattatcggacgtgcccgtattgataatgcttatactgatttcgaacgtaaactgtatgcatctacagatgggttattcgcaaaatctcaaggaaattatatgaatcaagaagataagaatacttcaacttatcttgatttcttagtgaatgtagataagaagttcggtgaaaattatcatctgttggtaaatttgggagggagcttttatgatgagaaatataaatcggatacgtttgaaggcaatttagtaggggtgcctaatttctttcacccgagtaatataccttctacggaaagtaattataacaaatccgaattacatacccagacacagtccatctatggtaaagctgaaatcggttatcggaactttctttatgcagatgtcacaggacgtatagactggttttctacattggtaggtacatctaaagaatatgtatgttatccttcagctggtctttcagtcatattgtcagaaatacttcctttgccggaaaagatcatttctttctggaagattcgtggatcatatgcacaagttggtaatcctccaagcgcataccttccttatgctacggtagcattggagaatggtaatgcaacaagtgccaattttacgcctgccagtcatttaaaaccggagatgaccaaggcattcgagttcggtatggacctgcgtttgttccaaaataaattgaatatcgcagcaacatattataattcaaacacttataaccaattgtttaaatatgagctaccgcctagtacagggtatgcttttgcttatgaaaatgccggtaaggtaaataactggggtattgaattgagtgttggttttaatcaagatctgggacctgtacagtggaattcaaacttgatttattcaatgaaccgtaatgagattaaagaattacttcctgaatatgtaaccgaccgcactacgggtatgaccgtaaagtcaccgacagagttttctgtggccactgctgattcatatagaatgattttgaaaaaaggtggtagtatgtctgacatttatgcgactaaactgaaacaggacttgcatggaaacattcttattactaatgggggcgtgtcggcagaagaaaatactttcatcaaagtaggttctgcggctccaaaatataatttaggttttagaaacagcttttcttggaaggggctggaacttgatttcttgattgacgcacgtgttggcggtgaagttatctcggctacacaggctctgatggatcagtttggagtgtctcagcaaacagcagatgcacgtgataataaaggtgtagtggtgaataaaggaaaactggatgcggaacagtattatggaactgttgcttcaggtaagaccggtttgctggcacattatgtatatagtgcaaccaatgttcgtttacgtgaaatgtcattatcatatatgcttccatcaaaatggtttggagaaaagttaaatatttctctttctttgacgggacataacctgttgatgttctacaataaagccccattcgatccggaacttacggctaatacagggacttattatcaaggtttcgattattttatgcctcctagtttgcgtagtttcggttttggtgtaaaagttaacttttgattttaattttttaaaaagaagaaaatgaaaaacaaaatctataacatctcacatatttgtttcctgatgcttatttcctgttttttgttaggaagctgtatgtctgatacgattaatctggatcctgataaaattcaggaagaagaattagacaaagataatttatggggtagttatctcacgacgatgcagcgtagggtagttcctgaagatgttaacttgtttcagcgctcggaggacctttttggtaatatgtattctggatattttgcaggaacgcagaactggggagggggagcaaatggtactacttacgctatttctgatgaatggaaggatgctccttttaaaagtgcgtttgtggaatttttgtcttcttggaatattctgcgtcagaaagtggattctacatctgttctttttgctgttggtgaaattgtaaaggtggaagctatgcataaagctacggatatgtatggtccattaccctacttgaaatttggattgacaaatcccgtcccttatgattcacaacaggctatctatgaatcattctttaaggaacttgatcatgccattgatatcttggttaaatttgatcaggctaatccgagttctaaagcccttgttaaatttgacctgatttttaatagtaatatcccgaattggattcgttttgcaaattctctgaaattacgtttggcgatgcgtataagtgctgtttatgaggatgctcagaaaatagctgaagcagcagttgctcatccgtatggggtgattgaaagtaatgacaacaatccgacaatgcagtccaattctaacctttcgtttacctataacaatcctattcacagtattagtagtgccgaaggttacgaagaggatgtaatgggtgccactatggatgcttatttgaatggttttgaggatcctcgtagagctgtgttttttgcgttgtcttctaatggcaattatcgagggttgcgtaatggacataagaatggagatatttttaaaggtgacgaggggttgtctaaacctaatatacaacaaggaacaccttacatctggatgactgcggctgaagttttctttttacgggcggaaggagccttaaagcaatgggatatgaaaggtactccggaggctctttataaatccggaatacgtgcttcttttgaacagcatggagtcaaaaatgtggaaaattatctggtcagtactaaagtcccggcaagatatcctggatttaaggctagcccttccgcgcctgcgccatctgatattacggttgtttggaatacgaacagtacaaaaaaacagttagaacagattattacccagaaatggattgcaatgtatccattaggacaggaagcatggagcgaattccgtcgtacaggatatcctaaaatatatgagattgtcaataacgaaagtggcggtgttattagtacttctatacagatccgccgtgttcctttcccttattctgaatatctggggaataaggatgaagtagaaaaggctataaaactattgaacggtccggataccggagcaactcgtttatggtgggatttagcagacaaatagtaataagtattatttataataaacgatatgaagaaattattaatgtatataattgtttctgtgatgattggcacggggattatatcgtgcaatacggatatagaagctttggatatagtagttcctgataatatgtctgaagaatattgggaaaatttgagagcatataaagctaggaatgatcatgaagtcttttttggctggtttggcggatggacagctaactctgctgatatgataaacttcttgagcagtgtacctgatagtgtggatattatttctatatggggtgattataagaatttaagtccggctcaaatagaagatttgcgttatgtgcaggatgtgaaaggaactcgggtgacatatacgatcttcgctcacaaaattcctgatgaatttatgtctggagagaatcatgaaattgcaacctcggagggaatagaagaatatgccaaggcattagttgatacaatgtataagtatggttatcaaggtattgaccttgattatgagcctggatatcaagaattcccgggagttccgttcaatggtcctttggttggaccttcatatatgtggcctgactatatggacaatatggaaatttttgtaaaagcattgggtaagtatattgggccaaaatccggaactcgtaacttgttgattatcgatggtgtgccttatcatttgaaacaaggactggctgagtactttaattatggtgttgtgcagtcatataattcttcatcgtattctgatttacagaggcgctttgataatgctgctcggaatggttggaaaccagaacagtatatctttgcagagacatttgaaggtggaaaatatgtgaatggaggggtttcgcatactttaagagagggaggtacagtaccgtcactggaaggtatggcacgttttcttcctatgtatgaaggtaaattggctactcgtaaaggaggttgtggtacatatcacatggaaaatgactaccgctctaatcctaattacaaatggacacgtgaggctatcagaataatgaatgaacattaatatttgaaaaaatgaaacagaatataaaatatgcactattggctctgttctcctttttaatgatgtcttgccagaaaagtcaggaatattatgaaggagtgtatattgtaggagcagataaattatctccggttgctaatttgacgattgatgatttaccggcagtgattggtattaaggttgcttcatctaatgcaatggagaataatgtggaagtaatgatgaagtctactccggaattggtagaatcgtttaataaggagtataagaagaattatgaattacttcctgaaaaatcttataagttggaaaatacaagcttgataattgaaaatggaaaaagcatttcttcagaaggtgtacgtttaagtattatcagtcgcgaactattgaaagagggtacgacttatgtgcttccggtaagtattgcgggagtgtctgataagaatctttctgtcatagaaggctcgcgtactatatacatcgttgttaatcaagttatcataacacaagcggctgatttgtctaatactgcggaatattttaaggttgattttaggaaagaatcaaaatataataccgcggcattgccaaatgtaacgtttgaagctcgggtacgttttaagaagatgacacctacaagtagaaaatggtgcttctctgttatgggattggaagagaacttctgtttgcgtacggcaggcagtaatacagagggttggaaactgcaattgagtggtggaagtccagctatcgattccagagatgttttgcctaatgataagtgggtgcacttagcttgtgtttatgatggttcacaaggtaaaaagtttatttatgttaatggagaattacaaggagaacttccggatacacgaggtactgttgatttaacctacgcttacgggcaggatgcaaatgccgcattctatattggacaatcagctgctgatgaccgttatatgaatgggtatgtcagcgaggcacgtgtatgggctgtcgcccgttcagctgctgatttgaagaataacgtatgttgggtggatcctttaactgatgggttggttgcttattggagattcaatgaacctgctgaggataatgctaaggttgtaaccgatcttactggtaatggatacaatgctacttttgctggttggggaaatcttaggtttgtagaaggagtgcgttgtcctgataatactgctgaatagttataataaagatatttaaacaatagtgtgaagcctaaaagttagataaagggacttttaggcttctttttaattttaatcgatgtaggtttatatacaaacaggaggtatttcggaaaaataaagtctcccaatgtatggatatccaaatatatgtgctatttttgtcatatacaaaagttatgtaatatgtctagatacgtcaatccttttacagatatagggtttaagataattttcggtcagcctgccagtaaggagcttcttataattctactgaatgaattgcttgccggagagcatcatattgaggaccttgtttttctggataaggaggatcgtgcggataatattcatgacaagggaattatttatgatctatattgtcgtactgatagtggtgaatttataattgtggaaatgcagaatcgttggcatagccattttctggaccgtacactttattatgtttgccgtgccgtgagccgtcagatagagaatcctcttcccaaacatattccgatacccgagaatcgggatgaaaatggaatgttggtgaaagaagaatttgttccttatggaaaacgttatcaactttctactgtttatggtgttttcttaatgaatttcaaggaagcgggattggaggaaaagttccgtacggatacggttgtctcggataaggattcgggagctgtggtaaatccccattttcgccaaatctatttgcagttcccctattttacaaaagaattggtggattgtaatactttatatgataaattaatttatgcattgaagaacatgagtaattggagcagaatgcctgatgcattgaaagaccaggtgtttgaacatttggcaaaattggcggcagtagcaaatctgtcggaggagaatcgtatcgcttatgataaagcggtagaccgctatagtgtgagtcagattgtggaagaagacgaacgtcgggcggctgaagaaaggtgccggattgctttagaggaggggacaagaaaagggattgaaaaaggtataaaagaaggaagaaaagaaggaagaaaagaagaacagtataatatcgctcgtcaaatgaagaatgacggagtgcctgttaacagtattattaaatatacaggacttgcgatcgaagaaattgaacaattataatttagtatattggacattttataatcatttgtttaaatgtatactaataaaaaactctcgtcacaaatatttgtagcgagagttttttcatttttaattacttactattataagccaccaacatccaaaccagtttttcctgttctttcagataatcgctcatcatcgaaacggttacttcgtctccggcttgagaagcgatagacagaatcttgcgttcctcaccgatcagatagctgatagactggagaatgctgttcagagcttcgtcaccattgctcaccttgtccacttcattgatattagccactttcagataatcactgaatttgttggcaggagttccgcccaacattaggattcgttctgctatttcgtccaccttttcggctgtgtcgtcatacatcttctcgaactggctatggagaacgaagaaattatgtcctttgatgttccagtggaagccacgaagattcgtgtaatatacttggaagtccgctaatagttgttgcaaagatgctactacgttgtttgctcccgattcattcagtttgataaattctaaagttttcatattcgttttatttttaatgatttatactcgttttattttttttctgtactgcaaagataaggcgtaaaatgcttgctgtcaaactgaaaatttctatctttgcatagatgaaatctataactttaaataatttgatagatgacaatacaacaattggaatacatattagcggtagatcagttccggcattttgcccgggcggctgaatattgccgggtgacgcagcctacattgagtgccatgattcagaagttggaagacgagctgggtgtgaagctgttcgaccgaaccgtgcaacccgtttgccctactactatcgggcaaaaagtgattgatcaggcacgggtgattttagctcaggcggctcaggtaaaagagataatcagtgaagagaaacaatcattgtccggcatattccgtttaggagtattgccgacggtagctccttacctgcttccgcgtttcttcccccaattgatggagaagtatccggagttggatattcgggtgacggaaatgaagacgcaggatattcagcaggccttgcacgccggagatctggatgcgggaattatcgccagcaagctggaggatagttttctgacggaagaaacattgttttacgagcaattttatgcgtatgtatccaagaaagaaccctccttcaaacatgatgttatccgcacctccgatataaccggtgaacggctttggctgttggatgagggacattgctttcgcgaccaactcgttcgcttttgccagatggaagcggtaaaagtcagtcagatggcctatcgtctgggtagtatggaaaccttcatgcggatggtggaaagcggaaaaggaatcacgtttatccccgaactggctgtcgtgcagttgacggaagaacaacgtaaactagtgcggccattcgccatcccgcgtcctacacgccaggttgtgttggctacaagcaaagatttcgttcgccacactttgctttgcgtcctcaaggaagagataaaatcagcggtccctaaagaaatgctgacgttgcagtctgttcagtgtttactgtagtctgtcagctcagtgtttgccgtatcaacttactttcgccgttttattcttgagccattggcttatttcagctcctttgaaatagataatcaaggagctgacaataataatcattcctgccactgtactgaatgtgggatattcgtccggcagcataacccaactcagtactgcaccgagaatgggattgatcagcctgcacatattgatatcgctgactttcgctcctttgctttgcaaggcgataaaccagaagctgaaggcgaagaccgagataaatacgagaatgccgagactgatatagaatccgcttggctttccgatgaaagaatgataaccttccgtgcccaatcctaccatatatataagcagtcctccgaaaaacatctgtacggcattcaggaaaataggattcacctttcccttatcttccgaaacggagatggcggaatagccttgaaaaatgatactaagcagcagaagcacgatacccgtaattcctttccagtcgagcggctcgccgtcacttcccattccgatgataaggaacagtccgataaggctgacaatgagactgataatcttatgcgcgtttaggcggtcatcgcttgcgagcagatgagccaacaatacattgataaggggagtcattcccatgatgatagacgagatggccccgcttacaaagtccacgccaaaataaaaggccgtgtatcccataaacatattgataagcaccaggttcagaaatagtttgctgtgttgccgtatttcctgccacattcctttgtgccaggtatatgcgaataagataatccccacagtcgtgaaacggagtccggcaaaattcatgggagtgaaatcgtagctcagcccttgtttgataaagggattgacgatagcccatagaacagaggccaatatagcataaaagagtccttttttcatttgaaataattcctttgtttaaaaaatgttgcaaagatagctataattgtatagatatactttgactttcagacttaattgattatttttggaaaataaacaattaacaatattgatttactatgaagaagtacatttcagaaatgatcgggacaatggtacttgtccttatgggatgtggtagtgccgtttttgcgggcaatatggcgggaacagtaggtgccggtgtgggcacggtaggtgtggctttggcctttggattatcagtagtggcgatggcgtatgctatcggaggcatttcgggatgtcatattaaccctgctatcactttaggggtatttctgacaggacgtatgaatggaaaagatgcaggaatgtatatgcttttccaagtgatcggagctattatcggctcggctattctttttgctttggtttctaccggagcccatgacggtcctacggtaacgggatcgaacagttttggtgacggggagatgttacaggcattcattgcggaagcggtatttactttcatttttgtattggtagtgcttggtgctaccgactcgaagaagggggcaggtaatttggcaggacttgctatcggcctcactctggtgttggtgcatatcgtatgtattcctattacaggtacttctgtcaatccggcacgcagtattgctccggcattgttcgagggaggagaagccttgtcgcagttgtggctattcatcattgctcctttcgtcggagctgccttgagcgctgtcgtatggaattatctgggagataagaaataactcataaaaaagaaagggacggcagtttcacaactaccgtcctcctttgcgtaattaatatattaaaaaaagagtgtttttcattttagattagcagattagggaaattttacttcataagttttaatgccgctatatagggtatttacgcgaattctcagtcctttctttccttccatccggtccttgattttatccagcttgaaagatacgtatccctcacccaaagtctggggatagtctccctcactgttgtgacggaattcaagattgatatattcatcttttccgctaccgtctgtggtaggagcggcttccgctttggggattaccagattcaggaaatgttttttatctgcactgtgcgtaccgtagtattggtattcaatcgtcagatatttgttatctttgttgatacgcatatcagtagtgtttattttatcatctccgattttctcttcagtattttcatcgtcatccatctcgacgatatcttttgtaagtatttcattaatctgttttacttgcacattgtagtcatatccgtttacgggagtttccagttcgttaaaaatgacaaaggcgcgttgcccctctgcaaattccgcactgttccattcctggccattattgggatacatcttttcaccgttatcgagagtgaaataaaaatccttgctatcctggctgattttgttgatcgtgctgataaccagcaggtcggccggaccgtcgttatcgtccaggcatgactgaagaatcagcgtagtggtcataatagcaaagataaaggcaatgaatttaaatttcttcatatacatacttaggttttagattgattaattattgctttgtattggaaaaatgcgtagagaacggaaatattgcattcgaatctgttaaagaaacaaaagtgcaaaaagagttgttctctaggtgcagtatttctatctttgctgcatttataaggtaaacacgtgtataggagaatggaagaatttgagttgtcggaacaatgcaggctaggcaataaccgtgcccgcaaggagctgtatgagcagtatgcggggcgtatgcttggaatttgtcttcggtatatcggcgaccgtgatactgcccaagacctgcttcacgacggttttataaagatattcgattctttcgacaagttcacctggcggggtgaaggttccctgcgggcgtggatggagagggtgatggtcaacattgcattgcagtatcttcgcaagaacgatgtaatgaatcagtcgacacccttggaagagctgccagaggaatatgaagagccggatacatccgatgtagaggcgattccgcaaaaagtgctgatgcagtttatcgaagagttgcccgtcggataccgtaccgtgtttaacctttataccttcgaagacaagtcgcataaggaaattgcccaagcattaggtatcaatgaaaaatcttcggcctcgcaactgtttcgcgcgaagagtgtattggcaaaaagagtaaaagaatggataatgcataatggatagatagagatggaagagaaagaattgtggatgaataagttgaaggagaagctcgcggattattccgagcctgtacctgcttccggttgggaacaactggagaaagagcttatgcctccagtggagaggagaatatatccttatcgaagatggatgatggctgctgcagccgttatattactggccgttgtctcgtccgtaagcctgtattttctgggaacacctgctgcggatcatatacgtaatacgcaaactccggcattggcttctatgcccgatgcgttgccgggagtgcagcgaccggatgtgcagggctcttccgtggaacctgtattgagaccagtggctcgtgagaaccggttggcgaaggcggctcctgcagtttccgaacataaggcgataggagacgaatttgcagtgaaggaggttgaatctgtttcggaagaagttgaacctacggtgaaggaagaagcggaaaagatggaagaaaagcgttcggatatgacacagactgagaatgatgaccgatctactgtcagaagacctcgccgaccttccggtaaggataaatatcatattccggcagagaaagcgacttctcgaaaagggacatggtcgatggggctttcagtcggcaattccggaggggcttcaacggaagtggggacaggaatcaatccttacatgtctcgtgtgagtatgctttctgtttcagacggtttgatggagattcctaacgaccagacattggtttttgagggtggagtaccttatctgcttcaaaaagaaaggcgggtagtagacattaagcatcaccaacccatctctttcggattatccgtccgtaaagctttggcgagaggcttttctcttgagacggggctgacctatacattactttcttcggacgcgaaacttgcaaatgaagaacatcagatagaacagaagctgcactatgtcggtatcccattgcgtgccaactggaattttctggataagaaactcgtgactctttatgtatccggtggtggtatggtcgagaagtgtgtttatggcaagctcggttcggacaaggagacggtgaaacctctgcaattctcggtgtccggtgcggtgggtgcgcagttgaatgccacgaaacatatcggtatttatgtagaaccgggtgtcgcttactatttcgatgatggttcggatattcagacgatacgaaaggagaatccgttcaatttcaatatacaggcgggtgtccgtttaacttattaatcagactgtaactattcaaaataatcatattgattgataaaggaagtctctactcctgaaagtcagggctttcttcctgtgttctggattggtgcggctttactatctgttttctttgccttattggtttggaatgcgaagtcgaaagaagtggattaaaagtgagtacattaggttaaaaataaagtcttacttttcgaagtattagtaactatttcgggtgagagttattataagtcttcccggaatagtttttatttaataatttaatgtgattgttttatgaaacacgtatttgacgatgagttattttgttcgttgaaaaacgaacttagtgaggtaagcgcacagattgatgcgcaaagtgcaaaattgatgggtctgatcgaccaaaaaaaagaatatccgctcaactgattcgggaaacgaagtcggagatacctgctagcatagaatatctgggagatccgaaaagattcatcgccattattctgcgggctattgatcagaagagattgactttcaatggaactgctaatagcgaacagactatccgttatttagcgactgtgatagacgtgattagcccgaaaactggcaaggtacttaagatagagacactggtatcttatgcgaagaagatacatgccggagagatagagggctgtaaggaaggggagtttgactggcttggataagccaggttgctggattgagaaaaacatggcgggaaatttgaaaaagacggtggtttttttcagattttccgctgtctttttcagaaagagaatacaaaagtgtgagaggtgtgagagagaattttcaactttctacttttctattatttaattctattatctatatattcaattaaaaaaaatacaaatgttacaaatcctctctcacacctctcacactttcgtggtaaatagaatgaaaatagataaaaacaggaagttttgttgtatagttgaacaacatctcgtgtatttgcagtatggaaaggaaaataattgcatataaaggatgttttaaagagttcttaaatagcttggatgcaagccccaagataaaatattatatgtgctaatgcttttggagacacaggataggatatctgttaagtttatatcggataatgaatgtcttagggtgtagaatcgaattttcgatggatttgtagggataaaaaatgcagagttgtcaaagataactctgcattttttattagctactgtacccaatcataggtcgctctttttattcgtatagcctgttcgattttacctgttcgggggcaatgacaaatacggcatatcttcttccatttcttccctttttagactcaaaattatgcttaaccattactttgccaatctggatcttcgctccgatggaatattgataaccggtacgttcacggatcagttcggcaatttcgctgacagtgaggtactgtaccttttcaaaccgttccggcttgcggatatgggtgagtaccagttcctcttccggtgaatggaaaatgaaatcttcattattcttttcgatccggttgttgtcctcctgcgtgaaccaatattgataacccggagtgttgagcaaatgctttatctgcgcatacagttgagtataattgattttgataaactcgatggaatcggcatggaaacacaggaagcggcggttgcctgtcgtgtcgtgaagaatctcctgatagttgcacgttccggcaaaggaggcggtgtgtgggaagttctgcgaacggcgtgcgtacgggagacggatactgattactttgcgggtcaccaaatccttgaatgtattcagatcgcgcccgctcattccttcgaattcgtcaaggttgataagcattgattgcgctattttggccaaatcgtctttactgttcggattgataaggccggtagaaagataagtgcgcagttcgggcggaagcaggttgttgataaaggttgtcttgccgatattctgcacctcgctgcatagtaaaagcacggtgtggttgacgacatcgtcttgggtggcggcagcacacatccctaccagataacgctccaggcactccgtccagaaactctggtggttggtacggacactgtccgccagaatacggatataatctgtcccgtcccattcgggaagttccttaaaatactcgcggatagggtggtagctgctactgaaatcggagtaaatcagattctgaatcatcttcacgttgcaggcatagcccagctcattcatctccatccaaatgctgttctccatcctgtcatcaagaatgcggaaaggatccggctgctctgtttcggaaaccttccggcgatattccatgatgtgaagcaactcgttatagcgcgtctcataacactcgctgatatgctgttctatttgcagcattcgtttttgggtactgttcagcttgttcgtattgaactcctccgtatgtgcataagcactggcaatcagcgaatccgtttccaccgccgggaggtcggtaaacaggctctttatgaaagctgccgcttcctggtcgggaatgccgtgacggttgtatttgcacgccaggtgatgcaggtaattgttgcggtttccttcggtgtatttttccgacttgttgtgatagtagttcagagtcaccattaatgaagcgtgtgaggaatgatagttgagcgcggtctcttcactgaccggattgttgtccgtttcctgctttttccttccgggtgttttcttcttcttttgcgttttatagaacagagggggctgttccacgatgaagggagtggcgtcacgattgaaatagatgcccggatcgtatgacaacagacaggtacgccccacatcctgaccggaggtgtcaatctcggtctggcaaagttgggagtaaaaagaagcgaccttattgtaggctgcattgtggaaatcttctatttcctgaatggtgtcgggcaatgtcccgtccggccgttgtgtgtgcgctatgattttcagtcccatacctttggggctgataaaggcgattcgggtgtagctgcacgctctcaccgtttgcaggatacgcgctaactcttctttactcaaatggtctatatctatcacgatatatcccagatatttgacaagggtcgcattggaacggccaccccgataattggcggagaatgtgacggaaggcagtttcttcttctcttcgtttgcagctttctctccctgctccaggaagatgcgtcgtacgctttctactgtgttacgatactttggactaccgatggcagatacgatttcttcttcggtcatttctgctatgatgcgatagaagtcaagaaaaatgttgaattgattcatttctttagtttactttttagtcggctgcgaaataactcttttgcagcgagatgtaacgaaactttcgggaaaatagtgaaaagttctttcagggctctcccagatattgcacgatggtagccacctgtttgggagagagcaggcggttgcgtgcacggtaaccctccgcttccagttcgtgtaggagagggaggttgaagagaatccatctccggagaatttgtaaagcaactttgatgcatacggtagggttgtaaagatgtgccagctctgctttcgtataggtgcggatgataaagaggttttctttgttattcataactgattgttcttgttgtatgctataaagttactgaaaataaacggtttgagaaaggaataacttcacttttattcattggaaatcaagaaacttcattcgagatcaagaaacttcgttggggaacagggagtgtggaagaggttgtatctttgtgtcgttaacaagaaggaaatgcatttctaatgtacaaaaactttaaaattattttagtatggcaatgacagtttcttattcagtagtgccgcgtaagaatcctgcaaaaaaggatgaaccggctaagtattatgcccaagcgcaatcagcgggcgagttggattttgaagagttgtgtgaggcgatcaccagtcgttccacctgtacggaaacggatgtgcgtgcctcgatttccggtattctttatgaggcgaagcgttcgttgaaggcggggcgtattgtgcggctgggtgatttgggcagtttgcagatcgggttgaccagtgagggagcagagtcggttaaggagttcgccacttcgatgatcaagggagcgcatgtcattttccgtccgggaaaacagttggcggaattgctgaagattcttagttatcagcaagtgcgtacacgcgcggctgcccagtcgggcgatggaagcgatggcggcaacggtgacggaggtagtggcaatggtgacggaggtagtggtgataaaggtgacggtgggtccggtgatggcggatcggacaacaacggagaagctccggatccggctgaataatagtactaacattaatttggtaaaaatatgaaagagatcgtaagtaaaatcctggaggtgattatgtgcctcattcctttcttcggaaagggaaaacgtgaaagagtagtgagggaagtgcgttataatgctacgcacaaggaggtgtgcaacgtgaaaacaacggaaagggcgaaggaagatgagaaagattagtctgattgtcattcattgttccgccacccgtgccgaccgtgattttacggcaaaggatgtggatacggctcaccgtttcaggggattctcgtgctgggggtatcactattacgtgcgtaaatcggggcagatagaaccgatgcgggacgaggatatggtaggtgctcatgcgcgtggctacaactcgatcagtttgggtgtgtgctttgaaggcggattggacgcgaacgggaaaccggcagatacacgcaccccgcgtcagaaagaggctttgcatcgcttggtgggagagttgttacagcgttatcccgaagcgaaagttgtgggacaccgggatctgagtcctgatacgaattataacggaatcgtggacccgtgggaacggatcaaagaatgcccctgtttcgaggtgattgaagaatttgagagttgagaatggagagttgagagttggctgcgcactgttatactgcatagttaactctcaattctcaactctcaattctcaacttcttcaactaattgaccaccacagtagtgaaatattctttaaatacctccgcggctttttcaagttgttcgggggtattttcttttacgtctttcagcttgtattcctgctccatcgcttcatacttatgtacgcctaatgtgtgataaggcaggatttccactcgttgcaccatcttatattttcccagagcctctcctaaacggcggatatcttcttcgaaatcgctgtagccgggcactaatacataacgcagccagaaaggtttctcgttttcttccagccatgctgccgtgcggatggtttgctcgttacttcttccggtcagtgcctgatggcgtgccggattgaactctttaatatccagcaatacaagatccgtcagtttgaaaagttcttctacttcttcgttccagataccgccgttgctgtctatgcatacatgtattcccttttctttcagttcacgcactaaagggactagtgctttggcttgaaacgtaggttctcctccggagaaagtgactcctccgcgtttcccgaaaaaaggacgttggctcatagccatgcggacgatttcttccggtggggtaggtgtacctccttttccggctattgtgtcggggttggcgcaatacaggcagcggaaattgcatccttgaagaaaaacgacgagccgtaagcccggcccgtcgaatgttcccatactttcgtatgaatgtacgtttatcgtcatattgagtagatctgattacatacgttcgtggaagctacggctgattacttccaattggtgttcgcggctcaacttcacgaagtttacggcataaccggaaacgcggatggtaagctgcgggtatttttccggatgttccatcgcatcataaagcatttcacggttcagaacattcacgttcaggtggtgagcgcctttggtgaagtaaccatccatcattgttaccagattttcgatacggtcttcttcagtggctcccaatgatttcggaacaatggagaacgtgttgctgataccgtcttgagagtcgcggtaacgaagtttcgctacggaactcaaagaagcgatagcaccgttcttgtcgcgtccgtgcatcgggttggctcccggagcgaaagcgacacctttggcacgtccgtcgggagtggcgccggtcttcttgccatacatcacgttggaagtgatggtcagcagcgaaagggtaggacgggcattcttgtaaaccggaagtttcttcaattcttcactgaagaaatataccaggtcgacacccaggtggtctaccttgtcgttgtcatttccgaagcaagggaactcaccttcgatatcgaaaccttccgtcagaccgatgtcattgcggcgtgcggttactttcgcatatttgatagccgacagtgaatcgagcgcgatggagagtccggctacaccgtaagcgaggttgatgcgcgggttcgtatctacaagcgccatctgggctttctcgtagtaatacttgtcgtgcatatagtggatgatattcatcgcttcgttgtagacacgggcgatttctgtcaataccttcttgtagttgctcattacttcttcgaagttgagaacatcacttgtcagtacggggatgtttttcaccattaccgtaccggtgttctcacaacgtccgccgttgatggcaagcagcagggctttcgccaggttgcagcgtgcaccgaagaactggatctgctttccgatttcctgataagacacgcagcaggctattccgtagtcgtcagactggcgcacttcacgcatcaggtcgtcgttctcatactggatggaagaagtgtcgatagaaactttagcacagaattctttgaacgcttccggcagttccgggctccacagtacagtcaggttcggttccggtgaaggaccgagattgtacaatgtctgcaagaaacggaaagaagtctttgtaaccttcgtgcgtccgtcgttgagacggcctcccagagattcggttacccaagtcgggtcgccggcaaagatatcgttgtaggattgcatacgcaggtggcgtaccatacgcagtttgatgacaaactggtcgatcagctcctgtgcgaaagactcggtgatggttcctttgctcaattcatattccatgtagatatcgaggaaagaagaaacattacccaatgacatggctgctccgtcttgttctttcacggcagccagataagccatgtacacccattgtacggcttcctgtgcggtataggcgggacggctcaagtcgagaccgtagtattcgcccagcaccttcatatccttcaatgccttgatctgttccgctacttcttcgcgcagacggatgcgggattcggtcatcgggccggtcaggttgcggaggtcttctttcttggcctctatcagtcggtcgataccgtaaagagccatacggcggtagtcaccgatgatacgtccgcgcgcatagttgtcgggcagtccggtgaggaatcccaatgagcggaacgaacggatttcttctgtatatacgtcgaatactccgtcattgtgcgtcttacggtaatgagtgaaaatatcttttacgcggtcgtccacttcgacaccgttttcgtgacacgccttgcttactacgttgatacccccgaaaggtttgatggcacgtttcagcagttcgtctgtctgcagaccgacgatcagttcgttttccttgtcgatatatcccgctttgtgggaagtgatggtagatacggtaacattatccagtgcgcggacaccgttgtttgctctctcttcagccaatgcttcgaggcagcggttccatacagcttttgtgcgttcggtaggtccttcgaggaaagatgcatctccgtagtacggagtgatattatgacttacgaaatctcttacgttgatttcgctgctccaaagaccgtctttaaagatcttatttaattccataaatgataaaattagaggttgtagttatccttttctttagagcgcacaaagttacaatcatttttcatataatcagcataaatatactctgattttatgctgtccaacataaaatacctataaattgctatcttttagaaatagatggctgattttttttagagaaactcttgcatatttgaaatatcttcgtacctttgcaccgcttttgacgaaaagcactcctgataaaggagttttggagaggtggcagagtggtcgattgcggcggtcttgaaaaccgttgaaggtaacacttcccggggttcgaatccctgtctctccgctgaaaagcagcaagttagctgcttttttattttatagggaagcgaattttcctcttaaggagaggtgctcgagtggttgaagaggcacgcctggaaagcgtgtatacgccaaaagtgtatcacgagttcgaatctcgttctctccgcattttcattatttttttgattatttgatgaaaacggctgtcttgatttgtcaggagagtcgttttttgtgttgtatagagataccgggaaaataaacctgcctttggcggggactttaggtaaataaatgtttatcttcgtatttaataggtagcaaacctaaaaaagatattgaagtatgagacgaattttactgggactatgttttttatctttcctcaatagtgcgtccggacaagaaattcccttgccggagagtatgccgcaggctcatccgagagtgctgactacaccggaagggaagcaggaaacgtggaacttgattaagaccgaagaatgggcaaaggatgttttcgataagctgagagagcgtacggagaaatataccgatctgacggccacccggccggattggttgttgtcgcgtctggctatgtattggaaatcccatgctactgaggtatatataaaaggtgaaactttcgaccatgcgggcggtgagaaagctccgtatcctaccgtgcgctatacgggaacacgtggaactgccgctactcacggccgtccccgactggcggatattgtgccgtacgatgatgatgataacgggaatgtgacattctgtaataatgcgcttcccgaccgtcctatggagagtgtgcatccgtctaaaaccgggcgtaacatcgaaagtctgaattgtgagatattgggaatcgcccgtgatgctgctttcctctattggatgacggaggaggagaaatttgcaaagttggcagccggagtgttcgatacttatatgacgggtatttattacagaaatgttccggttgatctgaatcacggtcatcagcagacactggtgggactgacttcctttgaagtgatccatgaagatgcgttgcatatcgctgtccctctatacgacttcctgtatgattatctgaaagcaaactacccgcagaagatggaaatctacgccggagcattcaagaaatgggcggacaatatcatagcgaacggagtgccgcataataactgggatttgttgcaggcacggtttatcatgaatgtggggctggtgctggaagacaacaaggcgtatgccgacgggaaaggacgggaatattacatagactatgtgatgaaccgttccagcattcgtcaatggagcttgacgcgtcttgccgaatatggttttgactctaaaacgggtatctgggcggaatgtccgggatatagcagtgtggtgattaatgattatgccaattttgtgaatcagtttgacaacaacctgcgatatgatttggtgaaggcgatgcctgtattgtcgaaagcggtagcgacaacccctcaatatctgtttcccaaccgtatgatttgcggtttcggagatacgcatccggggtatctgaacactaatttctttgtccgtatgatacagaatgcacaggcaaacgggaagaaggaacaggaagactatttcactgccttgttgaaatgcctgaatcccggtgccggaaatgagaaagcggaaaagaagaatgtgcgggtgtctgtcaattctttttttgaagataagccattgacgctgaatccggaggtgcaggcgggaaagatagaagaatatgtctctcctttgttccatgcgcctaacgtctcttggctggtgcagcgaaatggtatggatccgcgcagcagtctgatgatttcgcagaatggaagtgagggcaaccatatgcacgccaacggcatttctatggaactttacggaaaaggatatgtgctgggacccgatgcgggtatcggtcttttcctgtatagcgggttggattatgcggaatattattctcagtttccgagtcataatacggtttgtgtagatggaatatcgagttatccggtgatgaaaagcaatcattcttttgagttgctctcctgtttcccggcttcggcggaaccgggtggggagtttacctctgtcacatacagcaacctctatttccgcgaaccggaaagcagggcggatcagacgcgtatgatgggtatcgtcaccactgctccggaaacggggtattatgtggatgtgttccgcagccggaaagaaaaaggaggggacaagatgcatgattatttttatcataatctcgggcagacgctcacattgaccgctgccgacggaacggatctgaatctgcagtctacggaggaactggcgtttgccggtgcgcatctttatgcctattcttatttatatgataagaaagtggcggctaccggcaaggatgtgaaagcgacctttaccattgatatgaaagataagggaggcgatgatatatccatgaatctctggatgaagggagagccggaccgtgaagtctttacggctctgtcgcctatgaccgaagggttgagccgtacacccggtatgccttataatataaaggagcaacccacattgacttttgttgcccgccagcatggagaggcttggaaccgtccttttgtcgctgtttatgaaccgagtacacggaaagagccgtcggccattcaggctgtgtcctactttgatgcggaggaaaccgctctgacggattttgccggaatctgcgtgaaaagcaagaatgggcgtacagatcatatcttctcgctttccgacgctacgcagacggctacttatcaagggatgaaagtaaaagcggattatgcggtaatcagtaaccggtatgcgggagataaccgtacgctgtttatgggtaacggaacgcaactgatagcaccgggagtcagtatccgtacttctgttcccgccaatgttctgctcgaacagaagcaagggaaatggtatatcttgtcttccgcttcttgcacggtggtgatcggcggcaagaagatgaaagtggaagctgcacagaagacaaaaagatgtatatcctgtccatagattgataatattgtaatgtattggcagactgctaaggaaatattgcaataaaaaataaaaaaaacgtaggcaaacgttgtgaataccatattttttctaattttgcggtttcttgtctgattcggaagaaacggacaagaagtccttatttatatagggcggatatttagtgggaaatatttagtgggaaaataattatggtatatgcactgagaaatggtcgcagagtggtcgctctgttgtcatttctgttattgtgttgtggggtacatgtacacgcacaacgagtggctgtgaaaacgaacacgttgggatggctgactgccagccctaatgtcgaggccgaatttgttttgggtcgtcatatctctctcaatatgggagtcgctgcgaatccgatcagtacagacaattttaaaactactttcacacattttcagccggaagtacgttattggttaaaccgtccgatggtgagccattttctaggtgtcaccgctttcgcgaacaattttaatatgctggttaaagatgtgcatcacaaaggcgatgcgctggcagtcggtttgacgtacggttatgcttgggtgctgaacgatcattggaatattgaggcgacggcaggtatcggggtgatgcgctaccgtcagtttaagtacgacaagggtgctccgaaaccggatgcggcgaatgacagtaagacaacgctggcgccagtgaagctgggagtgtcttttgtgtatattatccggtaacggaacgaacatttatagttagaaaagagaatgaaaatcaattgtaaacgtgatagattaatcggaatcctcctggcagccatgctgctactcggtgcggatgcgtacgcccaacgtatgcgtgtgcaaggacacgtcaccaaccaacagggaaaaagcattccgaacgtgaatattatagatcctgtgacgaatgaacgcattgaaatctccgatgaggacggacgctacagtgtgctggcggaacgacacggatcgttgaaatatacttgtgtcgggtatgaagacaagacggtcaaggtgggcggaaagcagattatcaacgtggtgctcaaagatgcggtcattgaacttgacgaggtgattgtgatttcaaaagtgaaggataaagtggtgcccgagcctacggacattgagataaaaggcaattacttccatctgaaaacccgtgtgccggtgcctaaggagatgttcacttccaaccgccgtttggtgttgcaaccttctatctatgatgtgacacagaagaagcgtttgctgttacgtcccgtggtgttcgacggaggtacgtataatactacccagcggcgtatgtatgattataatatcgaacaggacccgctgcacgaatacatacaggtgaagactacttcctcgcggaacggggatattatcgcctatcatgattctatctatatagagtatctgcaacatgattatcgtgcggatgtacatcttgcgatggagaattaccgtgctattatctatcgggattctttctctatcgcacgcggtactgtcaatccgttgcgtttcctggaatataaattctccgctttcaatctgacggataagaaatatctccccaaacctgtgatgcaattgagggataccaaaggagaagtcaacttgactttcgttgtgggaaaagctgatctggatgataagaatccacagaatcaggtggaactgaatcgcttgaatcaagagttgcacgctatcgagatgaatccggaggcttcattgaaaagtttccatattacgggtgtcgcttcaccggacggttcgtatgaattgaatctgcgactggctaagttgcgtacggacaaggcgctggaccgtatcttgtcgcaactcgacccggagacccgcaaacttctggaggtgaaatcggacgcgtcggtcgcttcgtggaaagaagtggcggagttgctgcggaaagattccggacaggatacggccgacgagatcacggaattgattaagcgatacggagaaaagaattaccagttgaatcgcgcgctgaaatcgaaacctttttataaggaggttgctgctgtgtatctgcctaagttgagaaaagtgcagtacacttacggatattctattttccgttctttgacggatgaggaaattatgcagctctataagaaagatccgaaggagctgacacgttttgaatattaccggatgattgcaacggctaaaacgccggatgaaaaagagaggtattgtaaagaagctcttgaattgtacgataactttacgtatgcggcgaatgagctggctgtgttgaatattcagaaagatacgccggactccaagattcttgaaccgttcgtcagcaagtcggctccggtggaattgctttccaatcaggcgattgccctgttgcatgaaggtaaatatacgaaggccgattctgtgttgacactgcttccggagggagttgttgccgatgatttgcaggcgatcgttcaggcgatggcaggctattacgacgatgcgtttgagaaagtggcggctaccagccctttcaatgaagtgatcatgttgctggcgatgaagaagaataaggaagcatgggagaaggcttcgcagctggatacgggctcggctcgcgagtattatgtgaaggctatcgctgccaaccgtatggaaaaggtgggtgaagcacttatgtatattgagaaagctttggaactggatccttccttgctggagaccgcgagagtggacggtgacattattgacctgttgcccgaagagcagaaaataaagaatgataatacaacgaaagagtaaatgatggatatccttagaatcaaaaataaatatgcggcagtggcattgttcttgatgttgtctgttgctttgcaggcacaggattatggtgcattgaaatatatgttgcagaaaagacctgccaatgagaggtttgaaagtaataaattcaatgaacacctctttttctctgccgggctgggaccttacggtttgctgacgagcggaggacaggatggcatgggaatgacagccaatgcttttataggcaaatggttcactcctgttcacggggcgcgtctgggagcgactttgggctatttgccgtcggaagtatataacagtaagataaaaatggtaggaggcagcttcgactacctgctgaatatatcttctcttacattcggatacaacgaacagcgcaggttcgaacttttgggtatagcgggagttgaagtcggctattccagggccaatgacaatttggccggtgataatccggctgtgaagaatggacatgagttctattatggtgtccgtatgggattgcaggggaatatccgtctttcacggacactcgatttatttgtcgaaccccgaatcggatggtgcaacgatggattggggcatacggaaagttggagaaactataaaatgggaggatcggtcttggtgggtctgacctatatgcctgctgcggcgatgggtaggaagattcattttgacaacttcgataacagctcattcctcaatcatatgtttgtctcgttgtccggtggaatcagtacgctgaaaatgccggggataaagaatacactcaaaggattcggaccgcagttctctgccggaatcggtaaatggttcagtccgtcgtcgggagtacgcttgtccggaaccgttggctacagcgatacgcctgccggtagtgcgagcagctatttcaagcatatagacctgcatgccgattatttgctgaatatcaataatatactttggggatatgacgaacagaggcttttcactttgatcggtatagccggtgtcaatctgtccgggacaaaaggagtggcgcagacagccaagtatgcaccgggattgggtatcgggcttcaaggaagtttccggttgaaccgttccgtagatttgtttgtggaaccccgccttaatgtttatcagaagagatatgccggtggatgtggtttcggtagtacagaccagctcggagaactgaacttcggtgtgacgtatcacacaatagaccgtgcagcccgtcctcagaatggattctcaagcaatcatattgccgacaatctattcatgacgtcaggtatcggggcacagttattcctgaataagactaatctgaaacatctcgctgcatggggaccgcaactttccgcttctatcggaaaatggtttactccgtattccggtctgcgactggtagggacgggaggtttcttctccaattatttgcttccgacagatatggaggcggagagactcagacatatcaccgtaaccggaggattggattatttatggaatatcacttctaccatgagcggatatgatccggaacgtatttttgaactgatcggttcggtaggatttaatctggcttatacgtcgaattcagagcataagttccagccgggactcaatgcgggggtacagggagtatggcacatcaatgatttcttcggtttgtatctcgaaccgcaaatccgcctgtatcgtgataagtttatcgaaggaaatctgggtttcatacagaaggatgtgatggtggggatcaatgccggtttccattatcgttttgttccttattccaaagcggtcaatcgcagtgtgtttgagaaagatgacaaacggtatttcatatcgggagcattgggcgtaagcagtctgctggttgccaatcgggatttggtaaagaatatgggggtggaagctaagggtagtatcggaaaatggtatactccgctttctgcatggcgtgtgaacggaacaatcatgtataaggcgaaaacaccggataagttgaatcttcattatgctgggttaggaatggattatatgatgagtctcgctactttggcgaagggatatagccgggatcatgtgatagatgttgttccttttgtcggagtgacagccggattggtacgtcgtagaggtgaatttaaagcagttccgggaattgacaccggtgcgcaagtcaaactgaaactgggctcttccctcgatttctatgtggaacccaaagtaggcattcgcacggacacgtatgatggtatggatcagggaagacccgaccgcgttgcttctatggtgggaggattgatttacaagtttaaaatgcctacctttaaataaagtttgcattctacttacaaaaatacagctgtatattcgataaaaacaaattcaagagtgaaagttttgtcgctctttacttgattttgcctgctgactgttatctttgtttcaaaataatagtggagtaggataaggggatttcatttttcgttcgtactaataatagtactacaaaaaagaaaactatgaagattcgaatatgcatattgattattatatgggggatattatatccggagtatctgagctcgcaggaatccccttacgtattccgccagatcggagttgtcgaaggattaccggataactatgtaaaaagcgtttttcccatttccgacggacgtatcggggtgagaagcactgtgttgctaagcctgtatgacggtgcgaactattcaaattttcctttcaatattcatggcgaatatccgatagtatataaccacatcattcccgaacaatatattgataccgataaacgtttgtggatgaaagaacgtaaaagcctgcgcgtttttgatttgactaccgaacagtatatctataatgtagattcgctgtttcttcagttcgggctgaaagatagggtggaggatctgattattgattccgagaagcgttattggtttctcacgccgggatcttctgtctatacgtatgatacggaaacgaaatcggcagaactggtttgcaggaatgatgagtttatggaatattatggcggactgttgggaatagaaagtcacggcaactatagttggatggtgcatcagaaaggggctatccgctgctatgattgggagaagaaacgttttattcaggaactcgatttcttgaaaggacagctgaaaccggatgaccgtgttgtcttacggatactcgataacggtgacttctggctgatgtgggatcgggggataggttactatgatgtttataataaaaaatggaacccgatttcaagtatccggttgggacattattcatggttcacctcaatggatgtggataaaggtggaaatgcatgggtaggaaccgttatcgatggattttatgtaattgatatgcataatttctccgtaactcacacattggatatacctttgttgtcaggcaacagagtgagaaatgcagttcagagcatttattgcgatcatgagaataattccgtctggatggggctttacaatcagggaatgtgctattaccatcccagcatgaacaagataatgctgtgtaataagaaaatgattcgcggagactggaaaggagaggagatccgttgtatgttggagacttcgaaaggcgagattcttatgggaaccacttcgggactgtatcgttacgaaccggcaacacggagcttgaacaggctatataatgaattcaatcaaaagaattgccgtgtcctctacgaagacaaagaaaaccgtatctgggtggggacctatcatgacggattatattgtatagaacacgggaaagtaagatcttatgactatccggacacggattatcagaatgagttggatttcagtaatatacgtgttatggttgaggatccttccggacggttgtgggtgagtatatacggaggtgtaggcttgttcaatccggagaatgggcagataaaactattatccgaacagtttcccgagttgaagaaatataaagtagccaatgcgttggctattgacgaccggtcccgattggtagtgggtagcgataatggcttgtatatctatgatcctgcaaaaaatacaatctggatatccgaacaggatggacaagccaattcaatctttaatcaaggaagtatgaagtataaccagatattgaaagatcatgaaggtactttatggtttgctacccaatacggtttgaatgtccttacccatcatgggcaaagttatacattgggtaaagaagaagggttgtcacaagctatcctgaatgtggtggaagataaaaatcatgatatatggatatcgacagtcacttctatctataagataaaagtagaccgtaagacagataaatacagttttcatgttgtcagttatttgtccgaagatgagatccggcaggatgatttatatagctttccttctctgataacccgtgacaatcaactcttcttaggcttgatgaatggatttattgtcttttctcctgagaatatggttgataaccaatgcctcaatcggcctttattcacttcattccgcctgttcaatgttccggtagtgtcgggagaggaatataatgggcgcatattgtttgacaaagcattgagttattcggatgcagtgcaattggaatatgatgagaattatgtaacacttgaattttcgggactgaacttctctaatccttctcagacttcttttcgttatcagttggaaggctttgataaagaatggattgaaacatcgtttgagaatggacagggacgtgttgtgtataataatcttccgtctggcgaatatgttttccgtgtgtccgcagccggaaacgaccggatatggggaccggagtctgaattcagaattgtgattcatcctccgttttgggatacattggctgcccgcatcctctatgccgttttgggtattttgttggtcttcggtcttatttatgtgattaaccgccgtaatcggcagaagatgatccgtatgcaagaagaggaagctttgaggcagagagaagaattggaccagatgaaattccgtttctttaccaatatcagtcatgagctgcgtactccgctgacactgattatcactccgttggatatgatgatacgccgtttgacggatgagacgatgaaaaagcaactgaatacaatttataagaatgctcaaaaccttttgtcattggtaaatcaattactggattttcgtaaacttgaaatgaagggtgagagattgcatttgatgaatggcgatatggaggagtttattgtttctgcctacaataattttatgccgatggctgtagagaagcatcttaactttgtaaaccagtcggaacacagagcgctttatatgtttttcgatcgggataaagtacataaaattgtaaataatctcttgtccaatgcctttaagtacactccggagggaggaaccgtgaacttattacttgcgacggaggaagtggaagggagaaactatgtgagaatatcggtatccgacacaggaatcggaatatccgagtccgatcttccctacatctttgaccgtttctatcaggttggcaatgaaggggatgaaaagataggcagtggtatcggactccatctggtcagggaatatgtgaatattcacggtgggcgtataaaggttgacagtcagatggatcgcgggtcggtcttcaccgtttggttacctatggatttgacacctgaaccggatgagctgccggatgaaataactgatatggaatcgacgggtatgaaagaaaaggaaaccgttgtatctgcgtcagatgagaatataaagaaattgttgttggtagaagataatcaagagttccgtactttcctgaaagagcagttggaggatttttatcggatagtggaagcggcggatggtgaagaaggggaaagaaaggcgattgaagaaaatcccgatctcattatcagtgatatcatgatgccgaaagtggatggtatcgaactttgccgccgaatcaagacgaacgtgcagacatcccatatacctgtgatattattgacagcccgtactgccgatgatatcaagataaacagctacgaagtaggagccgactcttatatgtcgaaacctttcaactttgatatgctgatggtacgcattgagaagttgatagaacagcaggaaaggaggaaacaggaattccgtaagaatatagaagtaaatccgagtgctatcacaattacttccgtagacgagcaattgatacagaaatgcttggaatacatagaaaagaacatggacaatccggaatatggtgtagaggagttgagtggcgatttggggatggtacgcatgagtctttatcgtaagcttcaatccataaccggacataccccgacggactttatccgcagtatccgtttgaaacgggcagcgcaattattgcaaggaagccgattgccgatcatcgaaatagcgaatcgggtaggattcagctcttccagttatttctcgaagtgttttaaagaaatgtttgggatgttgcctaagcaatatgcagaagagactggaaaaaaagaatgacattatagttacgtttattagtttaattattacatttgtgccaatttataataaatagtgatatgaaagtattagttttaatttcattggtaggaggtttgttgttgtcctcttgcggaggtagttcaaaaaatagtgcgaacagtcaggaagtaaatccggcagatacaatttatctgggtgatttacgtgagaagtttgcaggggatagtattttctttaaagtagtggctccggatctgatgttgatggattatcaatatttctgggcagcgacggaatcggatgcaatagaaaaaggtctgacgaaagaatattataagcgcgtcaagaaagaaatcaccgaaacaaatgaggccattaaaaaaggtgtcatgaaaggtgcggatgtgaaacgtattccggattttcaggctgcgcagtaaagcaaataccagagataatctgcatctgtggcgaatcatgccacagacttatgcaaagtacagaacaggggagtcgccaaatgtaacggcctccccttttttttgttactatgaaacctgcatttatgccgatggaatggggatattttgcaaaaaaacacgcttgttaccatagttttgttttctgttacttttgtgctatttgtttttaaaacttgtttttacttttgtaacatcgttaaacggataaatttaatgccatgagtaaacaacaagctacatttgacgacttcttttcagaatgctacctgaaatatcgggagcatatcaaaaactatatcgctcttcgtatttgccgtccgtatgaagcggaagatttggcacaggatgtttttgtccgcttgtgggaatacagaatgtttgtaaaacccgacactgtctggtctttgctttttacgattgcccgtaatattgtgactgatcagatacgccgttattataagcaggaagattttgttgcttatatatataataaggtgaacgactctgatagaaacacgacggaggatgtaatctgttatcgtgaactgaaagaaaagcatgaggaggtggtgaaaagtcttcctgccaagcgccgccggatttacgagttgagttttaatcatgagctatcttgccctgctattgcaggaaaattgtctttgtctcctcgtacggtagagtgtcagttattgttggcgcgtaagactgtacgtggttgtttgcggaatgaattttcccaagtcggttaaataccgtctcggaataaagcatattaactttaataatttaatagtattatggaaattaaatccaaattcttatgtagtagaggagttgcattggcttttgccatattgctgggtggttcacccggtgtattgctctatgcgaatgattctgtagaagagagtttgactgtagcccagacaggacgtactatcaaaggacttgttacagatgtgaatggtgaaccgctgattggttgtaatgtagtggttgtaggaagtaatgcaggagtaattaccgacatcgacggtcggtttgcattgaacgtgcctgcggatgctaagcaaataaagattagctatatcggttatgtagaccagattattactcttcatgaccgttcggattttaaggttgtactgaaagaagacaataatgcattggatgaggtagttgttgttggttacggtacacaaaagaaagctactttgacgggtgcggtagaacaagtaagtagtaaggttttggaaagtcgtgccatcaccaatgttggtgcagctttacaaggagctactccgggtttggttgttacccgttccagctcacgtccgggtaatgaaggattgaatttccagattcgtggtgcgacatctgtaaatggcgggaaagtcttgattatagtggatggagtccctacactgaatgatgcctctttccagaatctgaatccggatgatatagaaagtatcagtgtgttgaaagatggttctgcttctatttatggtgctaaggctgccaacggtgtgattctggtaacaacgaaaaaaggtaagggaaaggtgacagtagactataatttcaatatgcgtttcacgactaacggtatcatggctttctctccaagtatggaggaatatgctactatgtggattgaagcgaataaagaacagaaaacaaaagactggtggaactggacttctgaagagaatatgttgaaaatgcaacagggaatctccggtatttatcatacgaatgctaaagactggggatatgatctcttcatcggagatgccaatcgtttggaggagatgtttgcacgtcgtttttcttatcagcataatttaagtttatcaggttctaatgagaaaacagattatcgtatatctttagcatatgcagataatcaggcaaacttggcgacagcgtatgatggccaaaaacagttgaatctgcgtttaaattatggaatcagacttactgactggtttaaattggaaacatcggctagtatgattaagactgacactgagtcaccttctgccggtattgatacatctttatatggaaacgaacctccgtttttccctgctaaaaatccctatgggcagtggtatgccaattttggtaaagtaggagaccgtcaacctgtagctgcaacctctgatggcgggcgtgacgaacgcatgaacttgactactcgcgttgatgtgaaagccattgttgatatttggaaaggaatcagttttgaaggtatggcttcattccaaaatgaagaatatcgtcgtgaccgttatgtgattcctgtacagacatatgattggtttggaaatcctgccgataaagttgtgagcaatacaaatcagtcattgatttatccgacagatgtattgaatattaaggatattcataatcctgcttatttgatgcaggccaataatatgcaatatcagtattattctgccttactgaaatacaaacgtacttttgcgaaagtgcataatgttgaggcgatggctggtatcaatgctgaaaagtgggtacagaaaaagatggtaacagcccgtgagaagatggaagatacaggtgtgtatgatttgaatcttgcttccggtgcacaaggaaatggaggaggtaagacccacaacggttcttactcttacattatgaagttgaattataattatgctgaaaagtatttgattgaattgatcggacgtcgtgacggaaattctaagttcgcaaagggacataaatttaaaaactttgtttcggtatccggaggttgggtctttacggaagagaactttttaaaagctattactcctgttgttaattttggaaaattacgtctcagctacggtaactccggaaatgatgcgggattgggagattttgactatttagttgctgtaacacaaggaagtactgtctttggttattctcctgcagcacaggtaagtactggtttggggaataatggtattatcagtcttgatcgtacgtgggaacgggtagagcagaaaaatgttggtattgacttgcactttttcaatagtcgcctgactacttctttcgactacttcattaaagataatatcggtatgctgtcggaagtcacttatcccggtgtactgggaggcaaatctccgaaaaccaatagtggacatctgaatgtaaaaggttgggaatttactatcggatggcgtgatcagattaaagacttctcttattatgctaatttcaatatcggagatactaaaagcaaattggaagaactgacgggagcagacggatatggagcaggagtgaataagactgtcaatggttatcctttgaatgcattcttcctttatcgtacagatggatactttaaggatcaagcggaagtagaccgttattatgcgttgtatgccgagcaggtaggagcactaaataatgtaggaaagggaacggttgccgaacttcgtcccggtgatactaaacgtcttgacttgaacggtgattataagattactgatcttggtaatgccgatagcgaccttcagtatattggagatgccaatccgcattttgtatatggtcttacagttggcgcatcgtggaaaggtattgatgtcagcgcaatgtttcaaggagttgccaaacaatatattatgcgtaatgattggatggcttatcctttccgtacaatctacacaaaccagaatccgacttttctcggacaaacttggacggaagatcataaagatgccagatatccgcgtctgacaaataatacaaaccgctctgcctggaattaccagaataacgacttcatgttgcagaatagtcgttatatccgtctgaagacattggtggtaggatacacattgccacagatatggacacgtaaagtgaaattggagaaagtccgtctttatttctcaggtaacgacctttgggaggctactagtattcgtgatggttttgacccggaaatgggttccgcttccaatacgagcggatatccttttgcccgtacttggtcattcggacttaatgttactttataatcaacctaagatatagactattgtatgaaaaagataacttatatattggcttgtgcttgcatgatgggattaacttcttgtgcagatacattccttgatttagaaccgttggattcaagaactgatgcggtctattttaaaaaaccggaacatttccgtgagtttgcaaatggattttacggacagctgcttggctggcgctcgggtataatggaacacatggacctgcagtctgatttagtaaacagccgtaatggaaaccaagcttatttgggatatggtacattgaccctcggttatgatgatgcccgttgggaccattataataacatacgtacttgtaacatattgcttcaacgtggggaagcgtatagtggtaaccagagtgaaattgatccctatcttggcgaagcgtatttctttcgtgcttataactatttttacctgttgaaatattttggaggcgtgcctattattacagttcctctcgatacggattcaccggaattgcaaaaaccgcgtaacagccgttatgaggtagcggacctgatacttagtgaccttcaaaatgctatcagcagattgccaaaagagcagaacattgctacgtcggataaaggacatataagtgagcaaggggcaaaagcatttaaggctcgtgtgttgctgtatgaagctacttggcgcaaatacaataaaacatctaccgattatgaaggctctgcaggtccgaaaagtgatcaggtaaatgagtttttggaggagtcaatatctctttctaaagatgtattggatgatgaggtttttagaatttggaaccataataacgaacttgataatttgagcagtcgttatcttttctgtttggaagatggaagtcagacaggaggttatggaaaagatagcaataaagagtttattatttactctgtttttgaccgtgttctgaatgcaggtgcattttccttgaataatgaaatgaattatatttatcctacccgtaagtttattgatatgtttgtgtgcaccaacggaatgccgacaactaataatgaacagtttaaaggatatcagaatgttacagatgagtatcagaatcgtgattatcgcctgatggcatatgtaggaggtccggccgaatctattggtagcacttcagggtatggtgaccagaagttccgtaaccctattgtgggtgataaaaaagaatcagccaattatccggtactgcgcttggcggaagtctgcttgaattatgcggaagctataatggaacgttatggtgaaataacggatgcccaactagggatatcaatcaataagttgcgtgatcgtgccggagtggctcatcttaccaatgcattggtagagaagattaaaaaacaacttaattcagaaaaggagttttcagagattatgttggacgagattcgtcgtgaacgtactgtagagctttatatggaaggtttccggtatgatgatttgaaacgttggggaatcttggaagaaacgttgaatcagtcccgtttgggaagagtagtcggagaagcaggatatagcactccgtttaaagatgcatctggaaatccgacttcgaagtacgatgctaaatcgtatgtttatggtgaggaaacagtaataacaggagatggaaaagaacatgcttgtgttgtgatttctcctaaggctaatagtactgtacgtaaagcacattacctttggccgatacctcaacaccagattaatctgaatccgaatttaaaacagaatccgggatattaattagccgagatctaataatctattaattaaaaataggatatatgaaacatttattgagaaatatgattggaatatttgcggtaacattgtttgtgttgctgttctatgcttgcgaacaagatccgcagataaaaaaatatgaatatccgatgccggaagtatccggaatgtcaccgaatatcggatatgtttcttcacaagtagttattaccggaacaaatttcggtgatcgtacggaacctgtgaaagtttttttcggaagtgtactagcgacgaaagtattgatgtgtaaaaataatcgcattgtagtggaagtgccggacggagctgcaagcggtgacgtaacaatgcaaatctggacgaatgatgtgggtgtaataggtcaatacaaagtgttgcctacaccatacgtgcactccgttgtctctgataatcctttgggaacaggagtagcggaagaggatgatgtagtaacgattaccggtgaaaatttcggaacggatgttaatgacattgaagttagttttaacgggacatcagctaaggaaatacgattggtggatgagtctaccatcgaagctgtcacccccagaaattgggtttccggtaatgtggttattacaattcgcggatatgctatgacaggaaatgcattgtttaatcctaatgcaaaaggtgacgtgacttctgtttatctgaaaaactataaacagccgtttgctaaagcgagtgaagaaagttggaagaatggtgaatggtggacacctgccgattggatacagaatgcggtgtcttttaacgcagatggtagtacgactgtttccggaatgcaatataaggcggcggaaggatatacgctggccttccaacacggctggaataagaagcaatatgctaacggtaagatgtaccaacaagttaaattacgtccggggacgtacagattggaagtgacgtatgcctatacaaaagtactcgacggaaattttgtggcagcatttattgtaaaaggaacggaagaaaatgatatcccggatactgatcaggttgcaactttggatggcacgaaaggtgtgtatgcttcatataagacttcaacagttgatggtgcttcagggcaactcgtgactgcttcgttcaatttggaggaagagactgatgtgttgatcggcttccttactacaatgaatagtggtgctaattcttattttaaaataacagaagtgaagttggttcttgagtaaaaatataaaaagcaacaagtatgaagaagatatataattatatactgccggttttgtttacggtatttgctgcatcgtgcgacggggatgatgaagaagtcatccgtatgcagaatcaggatcctgtcgtgacggtgacatccgtttcggatgcagttggttacgtgggaaatgaatttactatttacgggacaaattttggcataatcgcaaatgatgtggaggtatttgtcggcaatacgaaattgcaactcatctcttgtgaagatgaagaactgaccgtaagagttccggagggtaccactgccgggcgtatctccgtagtagtttacgggcaacgtgtagatacgcaattgatgtacgacgtactcggggttccgggtattagaacggtgattccttcgtatggttttgtcggtgatgaaattaaatttaatggtcacgatttaggagttccttcagctcattataaagtactgtttagtggaaaagaggaaagtgctacatttatggcggaaccggaaatggaaagtttctctgtgaaagtgccggaaggtgcgcaaagtggggagattaaacttaatattacagacaagccggtcaatgtgcccgtcgcatttactgttcttaagcatgcttcattggatgctgtaaaaggggaagcgacaggatatgctactggaatggcttctgtcagcggaacaaatcttaatcaggcggtgctggatgaaacggtagtgttgcaaccagtgaaagcattcttcactcctaaagccggaggagatgctgtggaagccgaagtgaaaacacaagaagatgaactgttggatatacagatacctgccacacttgtgccgggagattatacgatttctgtaactactcctttcgagaagatagaaaagactttagactttgagattcttccgaatccggtgctgacaagtattgagccattgaaaggatacgtaggtgcagtggtgaccgttgttgctgaaaaccttggaagaattgacaaagaagatattcaggtgatgttcggtgaaactccggctactgatataacaataacgggtggaaacacctttgaggttaaggtgccttcattgacaacatttggtgacattcctctgtcaatgactattcatggagttgaaatgaatatgggaggctatgcggcgtttgaaatattggcgtcgcccgtaatcacttccgttgagactgataataagttcagttcaaaagctgttcaagtaggtaatactgttactatcaaaggaacaggcttccggaatagtacaatctccagtgccacgttcggaggacaagatttgaactatacagtagtaagtgatacggaaattactgctagcgtctctgagcaatgtgctgaaggagaagatgtgataacattcaagtttgataatgttgtggtggatgtggtgagcagcgataagctgaatatgttgaaagcgggaagtgatatttcggattatatattaaccaatgtgaaacagccgttcgaatccaaagaaggaaagacgagcggacattgcacacctgtaggttggaaatttaactatggtgctggcaatgatggtttctgccataatgaatctgaaattgaaatgcctggtgaagggttgtatatgaatgatcaagggggattattggtaatccaaagcggatgggaaggccgatccaaaaaaatgaatggaaagatgttccagatctttaatatacctcagggcatttatgatgtggtgattgatgtggcagaacttgtcacaagcggaggcggtcgaaagaaagccggtttgtttatctctaaaggaggggaggagcaaactcctaatatggatgcaagtggaaattggacagaaaatacaaacttacttaaatctgttgatttttataaactaggagaaacttataatgaaaattacaaagaccaacgtttcgttattgaaaatcttactatagattatgagggtgaaacgaccctaggatttgctgttcattttgatagtaatagagcactaaaaatatcgtctatcaaagttctgttgaaataatcaattaccaaagtaatgcagtcttataatgattgcattacttgcaccgaatctttaaaatgaaaattattatgagaaaaatatgttgtatagcagccgcattcgtcctcttctccttcgcaggatgcggtgatggcgttgatttgccgagtttaggtgtagaaaccgatttgaataaaattattctgcccgacaataatgtcaatcttgttcaggttgaattgaaagacaactcagtacctatggaaaaggtaggaatacattctgaagaagattttgcccgtattcgtgagaaaaaagatgtggaagagccgtggatcacgggttatcagatgttgaaagagagttctttctctcagaaaaatacggatacatatccggttgagtatattgtgcgtggagcggcagtgactataaatggggcaacggtaggggaaaactatatcaatgcagcacgtggagcgtcaatagcttaccagcaggcattgcgttggaagatagaaaatgatgatgaatatgccgctaaggctgttgaaaacttgaataaatgggtacagatctgtgttggagttactggtaactctaatgtttctttggctgcagggctttatggctatgagttcgccattgccggtcaattattgcgggaatatgaaggttgggatcctgaagattttctggcttttcaacagtggttattaaaagtattctatccggcaaataaggatttcctggtgcgtcatcatgatactaaccacttgcattattgggcaaactggggattgtgcaacattgcttctacaatcgctattggcattgtcaccgataggcgtgatatttataatgaaggtattgaacatttccagtcgggagtgacaaacggacgtttgcgtcgtgctatctattacgactattcacccgaatacaattttgcacaatggcaggaaagtggacgtgatcagggccatacgttaatgtgtgtcggtttggttggtgttatttgccagttagcatggagtcagggagatgatttctttgcgtatgatgataatcttttcttgcggggatgtgagtatgctgcatgttgcaactatacagaggaaaccgtgcctttcactacttatatatggcaaaaacacaatcagtggaatggcatttctccggaagaacagacagttgtaggaggtggaaagtggatgaaacgtgctatttgggcattgccgtattatcattataagagtatcaaaaatatgtcggatgaaaaactgaaatatactaaaatcgctacggaatatgtgggtgtagaaggtggcggtggatattatgatcccaattccggcggttacgatgtattaggattcggtacattgatgtttgcaagataaaagcagaatgtgtttaatgaatttatttaatatgaagatatcattaaagttaatagttgtatttttattgttgttagggtggaatagtattttacgggcggaaatactcgtataccctgtcccgcaaggtatttactatgcccgtcacaacgacgactacacagtaaaagtacggcaagcaggtgaaaaagattgggtagatcttttcgaatataacgtaaaggtggatatggatacaaaatcggatgcaactatggtgcagtttgatttttccggtaaagtggaagtattaatacggaagaacaatggagagatccgttcggcaatagtacgtccactatctaaaggcattcagccgaagatagacggaaactttctgctgttcacattggataagccacaaaaactatctgtagaatttaacggtgaccgtttgaataatctgcacgtatttgccaatccgataattaaggatatacctgataagaatgatccgaacgtgatgtattttgagtccggtatccatgaacctaccgatgcggcaggcaagtgcttccgtattccttccaacactacggtctatttggaaggtggggcagtgctgaaaggctgtcttaattgtgacagcgtagaaaatgtgaagattctgggatatggtatgttgctcgaaccgcaacagggcatatcggtggcatattccaaaaatgtattgattgatggaattactgttgtcaattcacgtcactataccgtttccggcggacaaagtcaagaaataaccatcaaaaacctgaaatcattcagctatcaagggtggagtgacggattggatttcatgtcttgctccgatattgtcattgatgatgtgtttctgcgtaattccgatgattgtcttgctttctatactcaccgttggaattattatggagattgccggaaagtacgtgttcagaattctactctttgggctgatattgcgcaccccattaatatcggtacgcatggcaatacaaagacgggagatgaagtgctcgaagatatgttattcaaaaatatcgatatcttggagcatgatgaagacgaccgcaattatcaaggatgtatgaccatcaacgttggagaccataacttggcacgcaacataacgttcgaggatattcgggtcgaaaatattcaggaagggcaactgttccatcttcgtgtgatgtataaccaaaagtataataccggtccgggaagaggcgtgaaggatattgtgtttcgtaatatctcttgtacaggcaagtatatcaatccttccttgatagaaggttatgataagaaccgcaaagtagagaatattctgttcgagaatatcgtattgaacggtaaacgggtgactacattggaagagttgaacgtggataagaaagattttgtaggaaaagtgagaataaagtaacttttcaactaaaagttttattcaattttgctgtcataccctcatagtctcttgaatccccttattcatcggtgcttgagctatgagggtaagtatgatggtagcatgagggtaacttttgctctcataccccgttggatattatgtcggcctgtagtattgtaatgatggctccttatattcttcttgcaagctgtcttgtttctcaagagcttacaggtgtgaatagataggctcacagcagtgggcttttgggcttacatttgtggatagaagagctcactgctgtgagcttctctgtttgattaaaggttaatatatgaagtatggggcagtaaacagttactctcatgctgccatcatattaactcccatagctgaaatgctcttattcttgcactattcttatactgatacgaaatgaaaagatacatttaccttctagtccttacattgataaacaatttaccaagtgtagctgattctccttttcaattgaaaagactgcaagtggaatatgctgtgacaccgctgggaattgatgtagagaacccccgtttcagttggcaaatggagggagatactgatgaaagaggtttattgcagacagctcgtcaaatcgttgtaatcgatgaggctggcgtgcaagtatgggattcaaagaaaatcaccgatgatcaatctttgaatattgaatatgccggacttccgttaaaagctgctacccgctatcagtggacggttcatatatgggatacgaaacatagaaaagtatccgcttcttcctggttcgaaaccgggctgatgagtagtgatcgtgcctatgagggatggggcggtgcgaaatggattggagcaggggatgaggataggacattctattcccattatcttccggtttttaggttgaacttctccttgcggttggacgaaacgacaaggaccacctgttcgggatttatttatggagcgaatgatgagcgcttgatggaacggtataagaacctctatcagctggaaaacaaaaaagacgaatcatatataaaggttgaattgaatatcactccgttgctttcggggcaagatgcggtgttgaatatatatcgtgtaggctaccatccggatgataagaaagacattccttataaaagtttcgctattccgcaggagatggtcaatgaacataataaatacgattggcacacggtgacccttcgctcgaatttaggttttacacagttttatgtggacaataccgacaagcagatcggctctgtcaatctgaatcctttagggcagggcggtgactttatcgcttttccggtggtaggagatgtggggtattttgttcctgccggtcaggcagcttctttctcaaaagtagaaattgcaaactttcgaagtccggcgaatgtaattactacgttgcaagattcagtatgccgtatagttggtaggatatcggacactttcactacttttgctcctgaatcccattcggctcccatgctcagaacgctctttgcttcttcggaggcgaagataaagaaggcgcggttatatgttacttcacgcggtatctatgaagtatatctgaatggcagacggatagggaatgattatttcaatcccggaatcacccaatataacaaaacgcacttatatcagacatttgacgtaacagaatatatccattccggtcaaaatgcactcggtgctttactgtccgaaggatggtggagcggaggagcaacctttacaggagataattggaactttttcggagaccgccagtcattactggcaaaactggtaatcacttatgcagatggacaggagaaggttgtaataaccgaaccctctacctggcaatattacaatagaggtcctatctgttatggtagcttctttcagggagaagtatacgacgctttgcgtgatgcgagggtgaaaggatggagtacggcttcctataatgccgtagactggaaacctgcctgtgaagtagctttggaaggcaacgtcagtatggaaggaaatccggataaacctcgggtaaatgattattccgactttgaactgatagggcagttcggccagacagtaaaagcaaaaaaggagctgaccgccctctcggtggaggaagtacgccccggtgtatttgtttatgatatgagacagaatatggtcggtgtacctaagataaaactgtccggtatgaaacccggaacaagaatatgtctgcgttttgctgaagtgaaatatccggatttgcccgaatataaaggtaacaccggaatgattatgttagagaatatccgtgctgccatggcacaggacatctatatcgctaaaggaggtgaagaaacgatttttccccgtttcacctatcatggttatcgctttgtggaaataaccggtattgatgaaccccttcccgcagcgtcggtgaaaggagtagtgcttagctccattcacgagctggcttcccgttacgaaacatcggacgagaaagtaaataagttgtgggagaatattacttggtcttcctttgccaattttatgtctatccccaccgactgccctcaacggaacgaacgtttgggatgggcaggagatatttccgtattctcccgtacggctacgtacctggcggacgtacctcaatttttgagaagataccttcgttctatgcgtgatgtacagcgggaagatggtcgctttccggacattgctcctttgggtggaggattcggtggtttgctgtggggaagtgccggaatcacagttccttgggagtgttacctgcaatacggagacaaagttctcttggctgaacactatgacgccatgaaacgatatatttcctatatcctcgacaagaccatcgacccgaaaacaaatctgcttgtacagagcagggcatggggtgatttgtgtgattggctcggtcttgaagataacaggaatgataaatctctcttatgggaagccaattttatttatgacctcgaattaatgagcaagatagccactatcttgggtaagactacagatgcggaagaatatcggaagttgcacagcgacagaaaggctttcttcaatagcacttacctgcaaccggaaacctgcaagaccattcactccgctttcgtaccgaagaagcagggaacgttggtggatacacaaacttcttatgtcctcccgttggtattcggcatcattgatgaagagaataaaccgaaatttgtcaagaatctgatggaaacaattgtcagagaaaataggacagagcaaggcagatggtgtcctccttattcgttgatgaccggttttatcgggacggcatggattagtaaagcattgtccgataatggttgcagtgaggcggcgtacaagttattacagcagacgaactatccgtcgtggctgtattcggtggagcaaggagccactaccatttgggaacggttgaattcctatacccatgaagatggattcggtggaaataaccgtatgaattctttcaatcattattcttttggtgcagttggcgcatggatgtacaattactctttaggtatagaacgggatgaaaacttccccggatttaaacactttgtgctgaaaccagaagtggatacctgtgggaatatgacttatgccaaaggatattatgattctatgtatggacgtatcgaaagtagttggagagtagaagaagatgcagttatttatcagtgtacagttccggcaaatacaactgcaacgttacatcttcctgcaacttcagtgaagaacattgttgaggggaatagaactttaaagaaaagcaaagggatagagtatgtcggaatagaagatggtaggttagtattgcggcttttggccggcagatattcctttggaatcaaataaagacagaagaaagccctatatcctgaaagaacagatataggggaataagaggacatctcacgcgttggaaatattcttttgtaacaacttgctttggttttgtgcacagaatgaatactttttgctttggatttgaatataaaaatcttatattttgctttggatttgcgctaagtatgccatctttgtattgattataaataagttagttagcaatgtttcaacgattagccataaaagcccttcagcaatgggcacagaaagaagaaaggaaacctttggttttgagagagggcaagactaaacagatattaataaaatgataaattaaaggcttcatgagatcaaggctgtttttagctttgattttcacgaagcctttattattgtgaatactgtgatgattataatattatctgtcgttttttctcatcatccactacagccatcattccttctacttgtgcaagagctagcatacgtccgtggaaagaatatcccgggttgtagcctttatcttcatctcccagcatcattcgtccgtggtctacacgcatcggtaatcccggattctcattttcgaagatacggataaggtcaatcagatgtcctcttcccgtaagatgggagctttcaatgaagtttccaccttgcatggcagctgtgctgcgcagatgtacgaaatgagttctttttgcaaatttcttagccaactcacgtgtatcgttatgttcgcctgcactcaaagagcctgcacagaaagtcaatccattatgaggattatttacggcattcaagaaccattcaatatcactttcattggtaacgatacgcggtaaacctaatatttggaatggaggatcatccggatgtacgcacatattgacaccgtattcttcgcatacgggcatgatggcagataagaagtaacgcatattctcacgcaatgtatcacggtctatatctttgtacagagcgagtaaccgcttgaagatggcaaccggatttttatctccttccttgatattaccgttgacaaaaccttgtgtcttgacaatgattgtatcaatcagggcatctttctcttcttctgtgataaccttatccaattcggtaactttctgaagttcttcttcagtgtaatctttttctgctccttcacgttccaggattcggatatcgaaataagcaaaacggatacggtcgtaatatagggaactggtaccatccggccaagggtgttgcaagtctgtgcgtatccagtcgataacgggcatgaagttgtaacatactgtctttatgccgcatttacccaaattggcaaggcttactttatagttctcaatcaactgttcacgttctgctcctgcatatttgattgcttcgcatacaggaagactttccactaccgaccaacgtagaccataagattcgatgtatgatttcaaatcgttaatagcttctactgtccatatttcaccgttcggtacatcatgcagagcagtgacaatcccttccacccctatctgtcggagcatcggcaaggttatcttatcctttttgccgaaccatctccatgttttttccatcatagtcttttttcttctctttataaaacaggctattatttattgcttaaactccgctgaatgcactgaaaccaccgtcgataggcagcattgctccggttacgaagctggcggcttcactacataggaaatgcactgcaccattcaactctttaatgtcgccgaaacgtttcattggagttttagccaatactttcttgcttctgtctgtcagtgaaccatccgggttgataagcacacgacggttttggtcgccgataaagaagcccggtgcaatggcgtttacacggataccatcaccatatttaagtgccatttcgctggccagccattgagtgaaattggctacggtagtttttgcagccgagtatcccggtacacgggtgatagcactgtatgctgccattgaggatacattgatgatacatcctttgccttgttttgccattactttaccgaatatcatagacggatatactgttccgttcatattcaggttggttactttctcccagcaggagatatccatatcatagaaatgctgttccggttcaagagtcgctcccggcatattgccaccggcaatattcagcagaatatcaatctgtccccatttagctacgatttcttcggctactttttccaaattagagatgtcaagtacattaccgatgatgccgattacatcgttaccgtattgcttaagttcagccacacggttgtccagttgctcctgacgaatgtcaatagctactacttttgctccctgctgtacaaagtgttgggcaatatttccgcccaatacaccacctgctccggtaataacagcgactttaccggcaatactaaataattcgttcatggttctatcaaatgtttttatgatggatgcaaaaatagcgggtttttacacatgctatgatgcgtatctttgcaagatatttacttatctttgcaaaagtagtttagaaaggagatttatgaggaagataatgaatgagaagttgactattacgacttctaatcccgtccgtgcccgcttttatgaatatccgcgtttcacgtatccgtggcattttcatagtgagtatgaaattatttatgtggagaagggagagggggattgtctggtgggtgacagcattatctcctattcaaaaggtgatttgattcttttcggttccgaactgcctcatagtatgcaaagtccaccggatggcggggaagaatcagataacggagaagaatccgaactgaaagtaaaaggagtgaatattcagtttgagaaggacttcatgcattattccatctctcaatactcgcagtttattcctatcaggaatctgttggaagatgcttgcaggggaattaaattcactgttacccgttcaggaaaactcattaacctgttaaaacaaataccttctgccaaaggagcggaacaaattatcctgttgctttcacttctacagatgatggctaccagcaatcacaggaaatatctgactacttcccattatactccgtccccttccatcatgcgtaatgaaaggatggaaaaagtgattgcctatctgaacaagcattataccgagtccatcggcctggatgaaatagcttcttacacagcgatgaatcccaccgctttctgccggtactttaaagaaaacacaggaaagacattcaaagagtatgtacttgatatgcgtataggatatgcttgtaaactattgaatagtagtatgatgaacatatctcaaatcagtgctacctgcggatttgaatcacccgtacactttaaccgtatctttaaacgactaacaggtatgacaccgactttttatagagagcagatggaataagttcttcaagtaataaacatttgagtataatttctttctcgttcgtatataataggaaagatgaataaacatgaacgtaaatagaatgaagaaaagaattttgcttttgttgctggtgataccggcattggtgaaagcgcaagatgtgatgacagaaacccgtcaggaactgacgtctcctgatggagcttatcgttttaccttttatcaacgtgcggtgggagaggataatgcacaaatgtattataccttgacttataagaatcgtccggtgattgaagaaagtaaactgggtgttctgattgaaaatcagttatttgaatcggcgttgggtataccgaatgatacttgtcatttttggtgtgaaaatctgaagttgacagagactgaacatcaaaagacggacgagagatggaagcctgtatatggcgagcgtgcggaggttcgtgattgctataatgagatgactttgaagtttaagaaaggagaaggaaaaggtaatcgggatggtggttatgataagcgtaaaaactactttatgaatatcatagttcgcgcttataatgaaggagttgctttccgttatcattttccggaaatgacgaacggtcttttcttgcatatcgtcggtgagcagactagcttcacaatgcctgaaggaacgatggcgtattatgaacgttgggcacaagggccttatgaacttcgtccgttggaaggatggggcaaagaggagagtgagcgtcctttgacattggaactgcctgatggattatctgtagccttgttggaagcggaaatggtggattatgttcgtggtaaattccgtttatcggcagagaaaccttccactttggagacaagcctgtatagtagcgtcgatattatatctccttacagcactccgtggcgtgtaatcatggctgccgaacgtccggtcgatttaattaataacaatgatattgtcttgaatctgaatccggcttgcaagctggctgatacttcttggatcaaacccgggaaagtattccgttcgggcgacttgaaacaagatagagtaaaagcagccattgactttgcggcagaacgtggtattcagtatgtgcacatggatgcaggatggtacggaccggaaatgaaaatgagttcggacgctactactgtttctccggacaaagacctcgatatacctgctttgtgtaaatatgccgaatcgaaaggaatcggacttatggtgtatgtcaatcagcgtgcgttagtgcagcagttggatactttattgccattgtataagaaatggggattgaaaggtatcaagttcggttttgtacagataggtaatcagcgttggagtacctggttgcatgatgcagttcgtaaatgtggagaatatgatctgatggtagatattcatgacgaatatcgtccgacaggtttcagccgtacttatcctaacctgatgacgcaggaaggtattcgtggaaatgaagaaatgccggatgccacacacaatacgactcttccttttacccgctatctggcaggtgcaggagactatacgctttgctatttcaataaccgggtgaagaatacgaaagcacatcagttggcgatggcagctgtgtattacagtcctttgcaatttatgttttggtatgacagaccggaattctatcagggagaagaagaactggaattttggaaagcaattccgagtgtatgggatgacagccgcgcgttagatggagagattggtgaatatatcattcaggcacgtcgtttggggaatgactggtttgtaggagcaatgacgaatacggaagcccgcacaattacattgactacggattttctggaaccgggtaagaagtatatgctccatctgtacgaagatgacgacaaattgaatacacgcacgagagtacgcagtactcataagaagataaaagccggagataagcttgttttgaagctaaaagcgagtggcggagccgcattgcatttcactccattggaaaaataaatatgataaataataaagcaggaaataacatactgcaagaattagttgcacgacacccgggtctcatacataccgacacccgggtgtcaggcataccaacacccgggtgtcagcatgcttgagatccgggtgtcatacaacttgtttatatagcacaaatatttcttgaatacatatcgtttcattcatttttggtactataattaatcaaccacttcaccatctccggatcataatgggagaagaaaagggttttagctgtatcaagcgcagcgatagccgccatatcgtccggtgttaacgaaaaatcgaaaacattgaaattctcaatcatacgttctttatgagtcgatttaggaatcacaataatatcacgttgaatcagataacgcagtgcgacctgtgccactgatttgccatattctttaccgatttcctggagagtcgggttggtaaagaagtcgtttcgtccttcagcaaacggtccccatgacataattttagtaccatattctttcattacttcctgcaactttatctgttgattgaaaacgtgtgtctctacctgattgacggcaggagtaatttcacagaattctgccaagtctataaagcggtcaggatagaagttgctgacaccgattgcacggagtttaccagccttatatgcttcctccatggcccggtaagttccataataatcaccgaatggctgatgaatgagcagtaagtctatataatcactttttaatttgtgaagtgattcatcaatagaagctttagctttttcgtaaccggcatttgaaatccatacttttgtagtgatgaacagttcctcgcgtggcacaccgcatttgctgattgcatttcctacaccttcttcattatgataggcttgtgctgtatcaatagaacgatagcccacactgattgcatccgacacgcaacgttcacactcttcaggcgtaacctgataaacaccataacctaaaataggcatttcaatgccattgttcaattttactttttccataatcaagtatattattaaaataaaagcgtattctaatgtttttattatctttatttcctctatgcaaagttagtctgtaaaaggtaatctgtttttatatagattacgggttttgctaccttttttacggataacgctatctttgcatttaatatctactattatatatagtcgttttttgagtattttgttcttcatattcgtagtataggaagttaaatcaattaaaagaagcattatgaataaatattttcttgttgtattgttgtcattattcatgcaggttgctaaggtggcagcagccccctggcaatggtcagtggaaataaaagagctgatttcagaagagacaaacgcccacccttctgcctatctatggataccggaaaactgtaaacaagtccgtgccgtcatcatcgggcaacacaatatgaccgaagaaacaattttcgagcatcctgaatttcggaagaatatgggcaaactgggaattgcagagatatggatcactcccggaatagaccaacgctgggacgtgacaaaaggtacccaacaaatctttgaaacaatgatgaagaacttgtctgaaataagcggatatacagaactggagtttgccccggttatacctatcggacactcggcaatggctacttatccgtggaactttgccgcctggaatcctgaacgtacattggccgtactctctattcacggtgattctcccagaactcatttgacgggttacgggcgtgcgaatttggattggggaacccgtacgattgaagggatcccctcattaatggtaatgggagaggacgaatggtgggaagaccggttgataacctctttcgattatcgtcgtgaatacccgaatgctcccctttcatttcttgctgatgcaggacacggacatttcgacatatccgatgaattgattgattatctttccctctttctgaaaaagacagtggaatatcggttgccggagcattcgtcattggatgctccgattcagttaattccggtagaagcaaagaatggctggctggcagaccgttggcgaaagaatgaaaagcctacagccgaagccgcttcctatgataagtataaaggagacaagaaccatgcgttttggtattttgataaggaaatggcagatgccacagaaaaatattacgccaatgagcgtggaaagacagagcagtatatcggttttgagcaaaaaggaaaactgatcactttcaatccgaaatcccatgtacgtatgtctccttcttttcaacccgaagcggacggagtcactttccacctgaaagcagtgtacacagatacgttaaggaacgaatattcaaaagaacacagtacgcatcccattcgaatgtcgagaatttgcggtccggtggaagtggtgaatgatacaacttttactgttcgtttctatcggatgggattggataatcctaaacgtacaggaggcatctgtctgatggcttccgtaaaacaggatcataaataccggagtgccgttcagcaggtagagattcgtattccttaccggaataaggaagggataccccaaagtataattttcccgaaactatccgatgtaaaagcttcagtgaaagaaataagtttaaatggaactgctgactccggccttccggtttactattatgtaaaagaaggtccggcagagataaagggagataaactggtattgactaaaattcccccacgtgcaaaatttccggtaaaggtgacagtggtagcctggcaatatgggcgtagcggagaacctaaagtgcagactgctgaagcagtagaacagagcttttatattactgcccgttagtttgacaaagagattgttcaaggaatcagagtactaattccttgaacaatctttccaaagtcttatctaaatcagtagaaaatcccggatgtgggcgagatacttgtatgcaggaactttttactgcagtcagccaacgaaatctgtcaggaatatccatattggctatggctcctccctctttatttcccatgcatatcttgtcaaagacctgtaacccttctttcaggcaattcatatccagttcggaagaaaatagttttagtttgttctcatctatcgtatagagggatttcaggtatttagcttgtttggaaaacaacacaatccccatattgataaactcctcccgttctactttaggaacgaaacggatgactgcgtattcatataagtgcctttcttgcattttgcgcttcatttacaaatgtttcggaatgtttcatcctttcttctaaaaatcgaatataaatgtctctcaaatcctgtggagtttctgtgccttctgtccagttcaaccagtcgtcgggaatagcattgactatctcacggattttatccgaagtcaatatctgtctgaattcgatatctacctcttccagtttatcggcaaacggcaataatacatggtcttttatttgtacaaaaggaaccagtgcctgtttttgccagttagtccaggaatggtggaaataaagggacgccccatgatctatcagccatagttctttgtgccatatcaacatattggtatttttaatggtacggtctacgttagtcagcaaggcatccagccatactacttgcgaagccgtttttccatctacttgatgtactatcggatcaaaagtcaacgaaccggaaaggaaatgcaatcccatattcagtcctcgactccattgaagtaaatcctgtatctcttcgtctgcttccgttcgtccgaaggcctcgtccagattcagaaaaactatttcggggactctgaaacccagtgcacgggctatctccccaccaatcagttcggcaatcagcgcttttgttccgtgtcctgcccctctgaatttgactacatatttaaattcatcgtcagcttcggctagagcaggcaatgagcctccctcacgcagaggaagaatatatcttgtaacatttgccgtacgtaaatccatgtagctcctttctttaatttggggaataaagataggacgttttagatgaattttataagaaagtgggctttaaattaaagaattgtagcttaattaaataattttgtggctttgagtgtttaaggcaccttgttcgtatcttatagataaaagatagaaataatatgaataagaaagttttagttacggtaatcttgtttggttcattgacagtatcgggtatagtgtcagctcaatctgtatatcccggacaacatcagggaaagttgaaaaaggaaacagtcgctccccttcaggcggaaagttttgatttgaaagatgttcgcctgttgccaagtcgtttccgtgataatatgcttcgggattctgcctggatgacgtcaatagatgtgaatcgtctgctacatagcttccgtaccaatgccggtgtatttgccggacgtgagggcggatatatgacagtgaagaaactgggtggttgggaatccttggactgtgagcttcgcggacatactaccggacacatgctctcggcacttggtttgatgtacgcagctaccggcagtgagatattcaaactgaaaggcgatagcttggttaacggattggaagaagtgcagaatgcactgaaaaacggatatttgagtgcctggcccgaggaactgataaaccggaatattcagggaaaaggtgtatgggctccctggtatactttgcacaaacttttctccgggctgatagatcaatatctgtatgcggataataagaaagcattgactatcgtcacccgaatgggtgattgggcatacaataaattgaaaccccttagtgaagaaacacgtaaacttatgatccgcaatgaatttggcggtatcaatgagtcattctataatttatactcaataacgggagatgaacgttatcgttggctggcggaatatttctaccacaatgacgtaatcgacccattgaaagaacttcgtgatgacttgggaacgaagcataccaatactttcatcccgaaagtgatagccgaagcccgcaactacgagttaacccgcaacgagacaagcaggaaactatcggaattcttctggcacaccatgattgaccatcatacttttgctccgggatgtagcagtgacaaagaacactactttgatccgaagaagttatcccaacatctgaccggctataccggagaaacttgttgtacctataatatgctcaaacttagccgccatcttttttgctggacgggcgattcatctattgcggattattatgaaagggcattgtataatcacatcttgggacaacaagaccctgaaacaggtatggtagcttattttctgcctttgctttccgggtctcataagctgtatagcacaaaagagaactctttctggtgctgcgtaggtagcggatttgagaatcatgcaaagtttggagaagccatctactaccataacaatcagggaatatatgtaaatctatttatcccttcacaggtaacctggaaagaaaaaggactgacaatccgtcaggaaacggaatttccacaggaagaaacaacacgttttactcttcaggcagaaaatcctgtccgcacgactatttatctgcgctatccttcgtggagcaaggatgtaaaagtttcggtgaatggtaagaaaatatctgtaaaacagaaatctggttcttatattgccattacccgtgaatggaaagatggcgatcaaatctcggctacttatccgatgcaaatcaaactggaaactactccggataacccggataaggcagccttgttatatggcccgttggtattggcgggagaacggggaactgaaggtatgcaagcacctgctcctttctcaaatccggctctttataatgattattatacctataattttcatgtccctgcacatctgcgcacttctttgaaactggataagaaacaccctgaacgtgctttgcaacgtgtaggaagtgatttgaagtttacgacagaacaaggagatgtgattcgtccgctgtatgatttacatcaccagcgctatgtcgtatattgggatttacaatcagaataatagatagtaaacaacgatatgaagaatcgtttattaattgccgcttttgtaagtatctgctttttgtctggttcttgcaaaatatcatccggtcagggaagtcggtatgacttctcttctttggattctgttatccaaggatgggtagacaagggatattaccccggagcatccatttgtgtagtgaagaatgataccgtcatttttcagaagaactatcgggattatacacccgatacaaaagtatatgtcgcttctgccggaaaatgggtagcggctgctgtcataggcgcggtggtagaccgtactgatttgggatgggatgatccggtagaaaaatggttgccggaatttaaagacgatgctaaaggtaagattcttctccggcaattattatcccatacatcaggagtacgtccatatcttcccgagcctcgtgtagataactataatcatttggattcggcagtcactgaaattcttcctttggatacagtctttactcccggcactcgttttgaatatggtggacttgccatgcaaattgccggaagaatggcagaagtggcgatgggagaggagtttgagactctttttcaagaactgctggcgcaacctttggagatgaaaaactctcattttaccccaatcaacacggacggcggacatgcacccatgttagggggcggactgtgtactacaatgaatgattatcttcacttcctgtccatgatttatcatgatggaatgtataatggcaagcaaattatatcagcagaaactgtgaaagaaatgcaggccgaccaagtgaaaggcgccataatcccttcgaataactcggataattatgtatcgaaaggactaggacaatcccacaatggaatctatggattaggagaatggcgtgaattaatagataaaaagacaggcgaagcttatcagattagttcaccgggatgggccggtgcttatccgtggataaataaacacgataaagtttacggattcttcatttctcatgtaacaggttcttctgctaaagaagacggtttctcttctttctttggcagccctgtcatttcacggaccgtttcggaaatactaaaaggtaagccattggttgtcaaacaaggacgtatcaatgtaggaaacggctctctatactatgaggaagccggtcagggtgaaccaatcatctttgtacacggtcattcgcttgaccatcgtatgtgggatgaacaattttctgtgtttgcgaaaaagtatcatgtcattcgctatgatttaagaggatacggcatttcttcttcccaaacagaagattatcaatttatgcatgttgaagatctggttactttgatggactttttgcacatcaagaaagcgcatatcgtcggactttctttgggtggatttgtcactgctgatatgttggcgtatttccctgaccggatgttatcggcttttttagccagtggaaacatccgaaagtccaaaggccccagtgaaccgatgactaaagaggaagcaaaggtacgtgatgacgaaatagctgccctgaaaaagaagggagtggaagtgatgaagaaagagtggtttgaaggattaatgaaatccggtggtagccagcgtgaacggatgcgtgtgcctttgtggcagatgattgacgaatgggatgcgtggcaaccgctacacaaagaagtacgggtagtagcagggctggatgctattgaagaattgaagaagagtcaccctgctgtacctgccttaattgtagaaggtcattcttctgataacaaattttcaaaaaatcctcccatattggaatatctacctaatggaaagctgaaaatcatagaggattgcgggcacatgatgaatatggagcgaccggaggaattcaatgcagctttagaagaatttttaatcaatattgaacagtaaaatgaaaaagcaataaatatcatgaaacaaatagttctatgcctgatcggaatattatttgcatcgtttgtatctgcacaaaagataaatcatccttcccttttgtacacccctcaacgtattcagcaggtaaaacaacgtatgcagaatgaaccgaaattgcgggaagcctgggaggatattcagaaaaccgccgatgaagctttacaaaagaaagatttcaatcggttggattatttgtcgttggcttatctgatgacggataataaagagtatgcaaatataatcaaagagattcttttgaaagctgtggaagccgaatcctggggagatatggaaatgatggcacgtattccagtctggcgttcgcaactgggcatggcacataagagcttcctttctgccataggatatgatgcggcttataacataatgtcttcttcggaaagaaaaaagattgccgaaggcttgaaacgattggctgtagagcctgccttgggcgactggctgttggaacctacccgaatccattctttgaactctatgggacacaactggtggacttcctgtgtatgccagggtggaatattagcattaagcctacagaatgaacttcccgaggtaaaagattgggtggagcaacttcatgaatcacttcccgaatggtttgactttgcaggcgatgccttgcaacagaaagcaaagagttttgatgaggccggaggaatgtatgaaagtctgaattatgcaaactttggtattcaggaagctctattgtttcgaatcgcttggataaacactcatccgggacaaaatcccggcaatataccccaattggcaaaacttccgaactacttttctcaagtatgctatccgcgtacaggaatgctgcatagtttgaattttggagatagccataaaaatgtatcggcagaatccagtatgatgttattgtatgcattggggatgaaagatccaacaatattgtggtatatagtccaagtggaacaaggacaacatcgtgatggctttttcctgaatcgtccgatgggcttcctttacactcctgatttgagtaaggcgcccgctgtccctcaactgccaacttctcaattatttgccgattttggttgggctacgatgcgtaattcgtgggaaaaggatgctacgatgctggctgtaaaaagcggtcatacatggaatcattctcacgcagatgccaattcatttattgtctttcataaaggggtagatattattaaagacgggggaaactgctggtatcctaatcctgcttatcggaattatttctttcaaagtcaggcgcataatgtagtattgtttaatggagaaggacaacctcgtgagcagcagtacggcggttctactttgagaggatatttgcatcatcttctggatgcgggaaatgtgaaatatgtcttggctaatggaacaggtcctgtatctaataatttcagtcgtaatttccgccatttcctttggatggataatgttatttatatgattgatgatttgaggacacataaaataggacaatttgaatggttatggcatacgaatgggacatataaaaagtcgggagttgatgtgaatgtgacgaacggtaactcatcggttgtgattcgtccgttatatcctcgtttgctggctaaatccgatttcgtgcatgactatccggaagatttattttgggaagaaatacaggcacccactgaagacttgaaaggcactgaaacctattattcatttcatttgccagcagaagtcaatcgtataaaagggctgacagctattatattaaaggagactcccaatgagaaagacttgccacaaatggaacggcgggagggacaagattggattgggcttcgtattcgtcataaagggaaagtgaccgatctttatattaatcaattagcagacggcaggctgatgcacagcaactcatggattatgccggacggctggatgacagatgcttatatgtttgctgtctcttatcccgaaggtactgaagctactgacgcaaaagatttctttatctgtcatggcagtgcattgagacgtgataaggagacttatttttcttctctttccaaattatttgtaattcagaaagaagaaggtaaaaagttgaacctttggatagacgggcaaccgaagatccatgcaatgttcagaagtgagaagaaaccgacaactgttattgtgaatggtaataacttccctgttgtttacaaaaacgctcatgtgaaagtgaaatatcaataaatcttcaatagcattgagtaaataatttctccccttcgtatttatttattacatataacagatacgaaggggagactttttttataagaaggaatgtgctcttttggagatttttatgtatgtttgtcacatgtttaatatgaaaggaagcggttgtaagtgaagaacacgattaaatatctgattcttttaatcatatacttggtttgtggtgtaaatctgcaagcccagaattgtacatttcgtaatgtagtcatgtccgatggattgtccgggttattggtgaatgccatttataaagactcggaaggttttgtatggctaggaacagataattgtctcgatcgttttgatggtgtgaaagttcgccattatgaatttcgaggcgtggattccggcagaaagaaacgggtgaactgcatcacggaaacagccgacaatcagctttgggtaggaaacggtatcggactttggcgtctgaatcgtgcgaacggccagttggagagaattgttcccgaaaagatagattttgctgtaaatactttacttccggatggagatattctctatatcggtacggagaaaggattgttcattcaaaaggacgggcaattgctccaagtattgaccgaccggaatatgctggctgcctgtaatcgaattatggatctctgtctgaatgaagataaaagtgcgttatggctggctacagtgcaaggtttgttctcttattcattgaaagatggtaagattgattcttggcatttccaggagaatgttcccgaggccgattacttccgctgcctgactcgtattggagaaaccctttatttaggtacaatgagtcagggagtcgttcgtttcgatataaacaaaaagagcttttcgcatacagtatctttaggctgtgatgtcatttccgacatatccagtgatggaaaggagactgtatatattgcaacagatggtaatggcgttcatttcctttcacataaagcccaacaagtgacacgtcgtttttgtcacgatgtgagtgataaagaaggtattcgcagtaattccatttattcactattggtggatgacagaggtgctgtttgggtggggcactttcaggcaggtttggattactcactttatcagaatggtcttttccaaacttatgcttatcctcctctgtttaactctgctaatctttctattcgttcttttgtcaacagaggacacgaaaaagtcatcggttcacgtgacggtttgtattatataaatgaagctaccggagtcgtaaagagttttgtgaaacctgttttgacctcggatttgatattgacaatctgtttttatgaaggcgaatattatattggtacgtatggcggaggcatgatggtgttgaatccggagacgttatctctaaaatattttgcccagggaggagatggagatgcagagctgtttcagaaaggacatatcttttgtgtgcgaccggatgaaaaaggaaatctctggataggcacttcacagggattgttctgttataatagacaggcaaagcagatcaaacactttaccagcgccaattcccaattgccggaaggtaacgtttatgaagttagttttgactctaccggcaaaggatggattgccacggaaaccggtatgtgtatatatgatcctgcttctcaaagtttacgatctaatgtgttcccagaaggatttgtacatagggataaggtgcgcaccatttatgaagatgccggacacaacctttattttattcgtgaaaaggggagtctgtttacctctactttaacgatggatcgttttcggaaccgttccgtcttttctacgcttcctgacaattcgctgatgtcgatcgtggaagataaccagggttggttgtgggtggcttgcaatgatggattgttacgcataaaggaagaaggagaagagtatgatgccttcattttcaatgatggagtaccgggacccacttttacgaatggggctgcttataaagatgaaaaaggaatattatggttcggcaacaccaaaggtttgatttatgtcgatccgaagcgggtggatgaagtgcgtggtaaagttcgcccgattgtgtttacggatatattggctaatggcatttcttttaccaacccgtctttaaaatataatcagaataatctgactttctgctttacggattttgcttatggtctgccttcggctctattgtacgaatatcagttggaaggagtggataaagactggaaactattggctgcgcagaatgaggtttcctattatggattatcttccggaacttatacgttccgtgtgcgccttccgggaaatgaacagtcggaagctgtttaccaagtgacggtgcgtcctatgataccttggtggggatgggcactttctgttttattagttataggtattattgcttttatacgatattatgtgtggaatcgtatgcgccgcctgcttacttctcctgcatcggcaatctccgcatccatagagaagacacagcagaaagaccgaacgatagaacaagcggaagtgatttctgaagagtcttctatcgctgcaaccgaagaaaagtataaaaccaacaggctgactgaagaagaatgtaaagagctccataagaaactggttgcttatgtggagaaagaaaagccatatattaatcctgatttgaaaatgggcgacctggcttctgctctggatacttcttcgcattcattatcgtatcttttgaatcagtatctcaatcagtcttattatgactttataaacgaataccgcgtcactcaattcaagaaaatggtggtagatagtaaatattcccgctatacattaacggcactggcagaactttgcggcttcagttctcgtgcttcttttttccgttcattcaaaaagagtacgggagtcactccgaatgaatatattcgtagtataggtggaacagccaaggaagagtaacttttcgacttattatcactgaaatctattttatactcatatccctttcacccttcacaccgccctattcatcgggggtagagggtgaaggacctcccttcaccaagtggattttccttttactagtctttttctcgtaatctattaatagataagttgggatattcctaaaataataaaatttaaggcaactacttcattgcgagttagttgccttttttgtatctttaagcattccccccaaaaaacggtttgacggccaaaacgggggtaatctaaaataaaaacacatggtaaagatacaaaaaatctcagaaatcgaacctcgtttaggttttaccgagttcgatatgctaaaaaaatatcgtcaaagttttgcaacgagtgaattaggtcgcctccatgctctgtttcctttctcggaactggcccgacaaatgcatttgaagtcctctgctttgggtcgtaaaagttatttttctcccgaaggtaaaatagccttgatggtcttgaagtcctataccaacttttccgatgcacaactgattgagcatttaaacggtaatattcattaccagttgttttgtggtgttcagattgatccgcttcatccactaaccaatcctaaaatcgttagtgcaattcgtcaggaactagcggatcgccttgatgttgagtccttccagttcattcttgccgagcattggaaaccttatcttgagaaccttcatgtctgtatgaccgatgccacctgttatgaaagtcatctgcgttttcctactgataccaaactcttatgggaaggtattgtatggcttcatcgtcatctgtgcaaacattgccggaccttgcacatacaacgtccccgtaacaagtatcttgatgtacgccgtgcctatcttgcttatagcaaactgcgtaaacgcaggaaatcacagactcgtatgattacacgaaggttacttcagttattggaaaagttacttgaccagctggagcagcttcattcatcctacaggaacaggcttgcactatcctctgattaccaaagacgtttctcggtcatacagacagtccttgagcaagggaagaatttatttgcaggcaaaaaagtgtccaaccgtatcgtgagtatcgaccggcattaccttcgccccattatcagaggcaaggaaaccaaatccgttgaattcggagccaaagtcaacaatatacagatagacggaatctcctttatagaacatatctcctttaaggcttttaacgaaggagtacgtttgaaagactgtattcatctgcaacaacaactgaccggggttagggttaaggcgcttgcggcggattcaatctatgccaataatgccaaccggaaattttgtacaaaatatcatataagtacttcctttaagcgtaagggcagagctgccaaagatgagccgcttcggagaatcttacggtcggaactcagccgcgaaagagctacccgcctggaaggaagttttggaacgcagaaacaacattactcactggccaggataaaagctagaaacaggaaaacggaagtactttggattttctttggaatacatacagccaatgcggtatgtatgatagaaaaggtcgaaaagaaaaaaagaaaggcagcataatctgactaaaataacaggaaaaacaggagaggttttaacttcccctaaaaaagacatgtacataatgcatgggtgggaaggaaaaaacaagaatatgtaaacaatattctacaaaaaagatagaagactgggagagttgaacgaaaaaatcaagagaaaagctttgctttacgtgagcttttctcttgattttttagaaagaggaacatttactgaatatccctaagttcttcttctccctatacaaacttcttttgctcctattgcaaagttgttttttatagggagtaatctataaacgcaagctttgtttttataaatgaaacttgcgtttataaaaacaaagcttgcaattatataattgaagctttcatttatagttcacccttaatcaaacgtaactttgcaataagtgcaaagcaagtttgtctttaatgaaacggaacttatctattaatgttcgtacttcattaatagctttgatgtgacaatgaaacgatcaaataataaaattgaagaggggaagaggatgggagcaaacgagcgtaagtggagcaaagatacgttgatttgagtgatttgagtctcattttataaagtgatactctcttttttgtaaacgtaatatgttgatacttagagttgtatgtttaaataagtctacctagattcattgagattgatctgctttattttctagctgatatatccaaaatcacctctatatttgcattgtgatcaaaaccgaaaaagatagtattatggagacaacagctaacacttccgacaacattatcacccgttcttatgaagaatattatcaggtgattcttacctatattacttatcgtatcactcatcgctacgaagcggaggatctaacccaggatgtatttgtacgtctgctggactacaagcaaatgctccgtccggacacagtgaaatatttcttgttcaccattgcccgcaatattgtgatcgactatatccgtcgttattataagaagcaggagatagacagctatatctatgacactatgtccacttctaccaatgaaaccgaagaaaaaattatcggtgatgatttaatgacaatggaacggacccgcttggctgctatgcccgaacaacgtcggttaatttatacattgaaccgcttcgaaaataaaacgtctccggaaatcgcaaatgaactgaatttaagctgcaggacggtggaaaaccatctgtttctgggacgtcgtgaaatgcgcgagtttttccggaattgtatataatcttattcattaataaataaccctttgtgcttatggaaaaggagtcagaatttacaaagaggtacttgtatgcctcaccttattttagagaacaaaaatttaatactatttttaaacctcaaatttaattttatgaaacgaagaggattaatatttaattcgcggcctaacaaaacagcggtgtttgcgttaggattaatgctgggactttgtcctgtttcaaaggcgtgggccgatacaaacatgaaagatagtcaagtagtggcacaggctcaaaagaaagtgaaaggtcaagtcgttgatgcaacaggcgaaccattgattggtgtgaatattactgtaataggaggaacagaaggaactattacggatatcgacggaaattatacgattggtgtacctgctggagctaagttgaaattcagctatattggttataaggatcaaattatagatgtggctgcacaaactgtgataaatgtaaaattgcaggaagatagcgaagtattggacgaggttgtggtagtgggatacggttcacaaaagaaggagacattgactggtgctgtaacagtggtatctgataaaatgttgaagaataaaggaacgatgtcaagtccgttacaggcaatgcaaggtcaggttccgggtgttacgatcactcgcaattcggcagctccgggagatgagagctggggcttgaagttgcgtggttctgtttctgcaaataatgcggagccattgatcgttattgacggagttgcttatgatggtgtaaatgcactgcgtaatatcaacccttctgatattcagtctatcaattttctgaaagatgcatcggctgctatttatggttcccgggctgcaggtggtgtggtattggtaaccactaagcaggcaaaggaaggaaaagcgagaatagaatatagcggttcatacacttacaagatggtgggattgcagccggagctgatgactatgaacgagtgggcaaatgcagtgttacagacttgtcagaacgatggtcagccggattcttactcatgggtgaaatatgcgaaaatggcattggctaatgaaggtaaatacattgatttggatcacagtgcaaatcctttcgctcccagctattcagatgtaatggatttcgtgttcatggataccaactggcaagacgtgttgttcggcaattcttattctacgcaacatgacttagctgtttccggaggtacagaaaagaatttatatcgcttgtccgtagggtatatgtatgatgacagtaacttgaagtggggaaataataacaatcagcgtttcaatcttcgtttgactaataaactgaaagtctttgataacttttctattgaatctgtgatagcctataaccgtcaggatcaggtggctccttcacaactgaatagaacattgacttccagttatccgcaaccgggacttccggcttctacgattgatggaaaaccttattcgtggggaacttggttgtcaccgatttggtttgccgaactgggtggagataataaactgaaagtatctgaaattaatatcagtgagaaattcacttacaatattaataaacatctggatgtagtagcaaatctcggttataactccggagtagcttcacgtgatataaagaagatggctattacttcatataattatgcgggaaccaagataaacaccaaggccgacggttacaaacaggaagagtcgtcttacgagaaaacaagttcgcgtacagacttctattctatggcaggttatgttgattatcacaatacatttgcgcagcatcataatgtaagtgcaatggttggtgctcaatatgaattgaaagaatatgattattttggtgtatcggtgaaagatatacagaactcgttggaaactgtaaatggggcaggtctggtaaatctgacagataaacatggtacgaagtggcatgaggctgtgatgtcctactattctcgtttaaattataactataagtcaaaatacttattggaagtaaatatgcgttatgatggttcttccaagtttaagccggaaaatcgctgggacttcttttatggaatatccggtggatggcgtattacagaagaggcgtttatgaagaacatcaaatggttgaatgatttgaaaatccgtctttcttatggtgaagttggtaaccagagtggtattgatcgatatgatggtacacaattctataaatttgaatctcaaagcggagcctatatcggtcctaacaaaggcactatcatagatacgaatggtaaaatcgcttctctgggacgtgaatgggaacgcattaagaattataacttaggattggatttttccttattcaattcccgtctgacaggtactgccgaagtatacatgaaacgtaatgataatatgttgattaatgtttcttatccgggagttctgggtgataacgcaggtatgtcaaacaatggaaaattcagatcacatggatgggaagtcatggtaaactggtctgataagattggaaaagacttcacttatcatgtaggaggtacttattctttcaatacgaataaactgacggatattggtgcagtttcagttctgaaatccggttttgttgataaacagcaaggttatccgttgaatagtatttttggtttgcgttatgccggcaaagcacagacagaagaagaacgtcaaaaatatctatatcgcttcctgactggtaatactatcggactgacagaacaaaacttccgtttgggagataatatgtatgctgacgtaaataatgacggcaaactggatcagaatgatattgtttatttaggtacagatgatccgaaaatctctttctcttttaatgtaggagcagaatggaagggatttgatttatcactagttttccagggtgctgctaaacgtactattttccgtaatggagataataacggtaatgagatttggcgtataccgatgaaagcattatatctgaacacttcgaatcaatcggtaggtaacacgtggagtccggagaaccggggtgcttattatccgacatatagtaataagaatgaaatcaatgactacaactatcaggcttcttcctggtcagtggaagatggttcttacattcgtctgaaaaatgtgacattgggatacaatgtaccttctgcctttttggctaaaacgaaagcaattagttcttgtcgtgtatatgtagcaggtgctgatctttgggaatattctaaaattaacgacggatgggatccggaggctagccgtaaggtatcagcagcaggacgtttcccctttgtccgtacagtgactttcggattaaatctaactttttaatgtatgaagaatatgaaactatataagaaagcttttttaattttatcgcttggtctgacactgaatgcgtgtctggatcttgatccgcaggaccaactggcagatggcaacttatggggggcagcagatgattttaaatattttgcaactaatttctatggttggactcgtgattttacatcggtaatttctgatggtgcacattctgactggcgttcggacttgatgacttccagttctgtaaatatgtacagcaatggtagtaatccgattcctacttcagacggtaactataccagcaattatgcccatatccgccgttgcaatttgttgctgcaaaaagcggcgtctttttccggtaacggtgatattagtcgctatgtagcagaagcgaagttcttccgtgcttattcttattttgatttggtgcaattgtttggcaatgtgattatcactaaagaaccgttggatattacttcacccgagttacgcatgagccgcaatgaccgtagcgaagtgattgacttcgtgattcaggatttgaaggatgcggctgaagtattaccggaaacaattacgacagacgatgaagggcgtatttcaaaatggggagcttatgcattcctttcacgtgttgctttatatgaaggcacatggcaacaaaaccgcaataatgaagaacgtggcaaagcattgttgagtattgcagcggatgcggcgaaaaaagttatcgacagtaagcaattcgagctattcaaaccagcagcattgggagagatggcttataaatacctgttcattttagagaatgtacagtctaatcctgcgaatctgactaagagtgccaataaagaatatatattctatcgtcgtcatgatgaaacgattgctccgatcgggactaatatcacacatggttgtgtagcgaacgtgcaatatattaatcgtaaatttgtgaatatgtatctttgtagcaatgggctacctattgaccatgccaagagtgctgacgtctttaaaggttatggaggtctgactacggaatttgaaaatcgtgataatcgcatgaagaactgtcttctggctcatggcactaaatattgggataacgacaaaccgcgtattgactggaaaggtatggatggggaagatgcgaccaatgccattacatgtaatgtattccaaggttccggttatcaaaaccaaaaatggggtacggaacgtaaggtggccgatacatttgaaggttacgacttcccgattattcgttatgcagaagttttattgaattatgccgaagctatgtatgagttgggaaccaccggcaaagctttggatgatgccttgaatatctcgttgaatttggttcgtcttcgtgtaaacccggatatgcctaaactgactacgtcttttgcttcagaaaacagtttgaatatgcgagaggaaatccgtcgtgaacgtaccatcgaattgtacaatgaaggtttccgagttgatgatttgaagcgttggaatactgctattgtagagatgcctaaacctattctaggagtgaaatggacaggaactgattttgcgacttcatgggctggcgcttctaatatggcaaaagactccgatggctgtttgatcttggaaaatagtcggcgctggggtagtaaaaatgacctgtatccgcttccggtagatcagtgtcagttgaatccgaacttgggacagaattcgggatggcaataatcaagtctgaataacttaaagaataagaatcatgaaaagagattatataaaatattttgttggactggcggcttgttcgtttttaggtctgacttcatgtgatgatgataaggatttaggaggaaagatggacgaaatgattacagtgtccaccattactcttaacgaaactcaatatgatgcagggaataaaacaatttgtctgctgaagaacaaagaactgcaactctcttggagtattgcacctgaaaatgcaaccaatgctaatgtgcaatggacttcgtcggatgaatctattgttgctgttacacgggaaggtaaggtcgtgactaaggataaagcaggaaaagctattattacattaacgccggaaatcggtttcggtccggaagctacgatcgtcactagaactgttgaggtcttggaggaatatacctacatgtcatctattaatataaagaacgaaccagtggaagagattgcagctggggatgaatatcagttggaagttgtgtcagaaccgtcaaatgttacatttaaacgatataagtgggcaagcagtaatccggaggtagctatcgtagatgaaaagacaggattggtaactggaatcagtaaaggtaatgcaactattacggtgactgctgatgattttagttcgactcctgtatttgcaagttgcaacataggagttaaaatagtgactccaattactggaatgacatttactgaagataaagaactcaatcaattaggatacggacaggaataccagatcaaatatacattagatcctgtagatgctactgcatctttactgacttggacaagtgataaccctgatatgattagtgtagataaaacaggaaaattgaaagtacatactactaaggccgcttctgctgtgataacagcttcttatggccctgttgtacaaaatgtaactgtcacagttgccgatggacgtttctggtattcattaggtaatggtttgggtaatggactggataataattggtatttggatggcaacaatgcgtctgttgtttcatctgatggaaataagaccactgttcagatgggctccggataccgtggtgacttatggcttgcaagaagtggtaaaggaaaaattgtaaatgtaactcctgctgattatagatattttgccattaaggtaggatttaaatctcaattggttccaggaaagaacaaacccaatggttgtattaaattagagatctttgatgatggtattaagaaaatcggtcctgaatattttggaacaggcggagatgctaataatagatacgagattctgggtgcaagtgagatttcgactacggagccaaatgtcttgtattacgacttacagtcaaaatataaaactgtgactcctacagattggaatcaggtctttgatttagtgcaatgtaagtttgtaattgccgatttcccggaaactgctcagacttatgatctttactggattcgttctttcaaatccatagaggaacttcaagcttttgtagatagtgaaaacaatactaacgaataactaccatgaataagatgaaattatatacaataataggagcagggctttttgccctgacttctaccacgcttttagcatgtagcgaaatagaagacggctctaatgatatgagtagttggccggaagtgaaggattatgttacgactttggagcatccttgtatgcttcatacagaaacggattttgagtttgtaaaaggaaaagtgcaagccggtgcgcaaccttggaaaaatgcgttcgatcatttaagtcgtggtgggaatagcttgtcacaatcaaattataaggcttctccggtgaaattattggcgcgtctcgatcaaaataattgggcaggcaaatatcccaatgactggaataactacacgaagttgatgaaggacgctgccgcagcctatcaattggcccttcgatggaaattgtcggagactgacggtgcacagtatgcagatgctgctgttgctattttgaatgactgggctaaaacatgtacaggatttatcgtgaatgataaaggtgaatttatagatccgaacgagttcttgatttttattcaggtacatcaaatagcaaatgcagcagagattatgcgttcttatccaggatggcaggaagctgattttgttaagtttaaagcatggattgcagatgtcttttatcctcatatcacaaaattcctgtctacgcacaatggaaatgaatgtgcacttcattattggctcaactgggatttatctgcgatgacagctttactttctatcggtattttggcggatgataactttaaaatcaatgaagctattcaatatttcaaattcggtattggttcgggaaatataggaaatggcgttcctttcatacatttagatccggatagtaatgaaatgctgggacaatgtcaggaatcaggtcgtgaccagggacatgctaccttgtgtgtcagtctgctgggtgctttctgtcagatggcaaagaatgtaggtgaagaccttttcatctttgatgacggacgtgcattggctatgtgtgagtatgtggctaaatacaatatcggtggtgctgaaaccggtagttcaagtgccagttggaagatgacgagttttaaatatacagataatgatctgccttatactacttatacaaattgtagtggaagctgggataccatttctgcacaggaaagaagagagggaaaggattcacgtggtgaagtgcgtcctgcgtgggagctggtgaatcgtttggcgcaggattatggtaaatcaagcatctatgctaagatgtgggttgataaaatgcgtgaaaatgcatcacgcggaaattccgatggtggagcaggtgactatggacctaatagtggtggttatgaccaattaggtttcggaaccctgatgtttgccaaagaataaataagaatgcttttggttatgtagcatgtatttttacaataatcttgcataaatagaaaaaagttgggaagggattaggtatttacctaatccctttcgtatatataagtaaataggtcagtaaatagattgttttgaaattagagataggattcagttttaaaagtgcttggtttttatataaggtagaaagaacctgtttttaggagtaacgaatctagttttgaatgaaattgattagtaaggtatatgcgtaaaaagattctgtttttagcaggaatgatggcttgcagttcattggcaggcgcacaagaaatttctaagacctgggtggctgataaggggaatggaacttatcagaacccggttcttcatgctgactattcagacccggatatctgtgcggccggagatgatttctatatgacagcatccagttttaactgtattcctggaattcctattcttcattccaatgatttggttaattggtcgttagtaaactatgcgttaccggttcaggagccggaacctttcttcgataaggcacagcatggcaaaggcgtatgggcaccggccattcgttttcataacggagaattttatatttactggggtgatccggattatggaatctatatgattaaagccaaagatccgaaaggaaaatggagcaaaccggtattggtgaaagcagggaaaggaatgattgatgcaactcctttgtgggacgaagacggaaaagtatatctgatacatgcttatgccggaagccgtagtggagtgaacagtatcctcgtcatttgcgaactgaatgcggaaggaacagaagttatttccgatccggtgatggtgttcgacggaaatgatggaaagaatcataccgtagaaggaccgaagctctataaacgcaacggatactattatatttttgctccggcaggaggggtagcaaccggttggcaattggtgcttcgctcaaagaacatctatggcccttacgaatcgaaaatcgtgatggcacaaggaaagacaacgataaacggcccccatcagggcggctgggtagacaccaacacaggagaatcctggttcgtccattttcaagataaaggcgcttacggacgtgtgattcatctgaatccgatgatgtgggtaaatgactggcctgtaatcggagtggacaaggataaagacggttgcggtgaacctgtaacgacttataagaaaccgaatgtgggaaagacctatccgatcgctactccgccggagagtgacgaattcaatacccggcatttgggattacaatggcaatggcatgccaataaaaaagacacttacgggtttactaccgatttgggatttatccgtctttatgcaggcagcctttcgaaagagtttgtgaacttctgggaagttcctaatctgttgatgcaaaagttcccggctgaagagtttacagctacgaccaagctgatatttactgccaagcaggatggagaacaaaccggaattattgtgatgggatgggattatagttatctttctattcgcaaggcgggagatcagtttattctgcaacaagcagtctgcaaggatgcggaacagcaaaatcccgaacagataaaagaattggcaaacattccggtggaacatctgaagatgccgggagtagcagataatgagtggcaaacagtttacttgcaagtaaaggttcgtaaaggagccgtttgtacattcgcttatagtctggacggaaagaaatacacgacagtgggagagactttcacagcccgacaaggcaaatggatcggagccaaagttggagtattttgtgtaactccgaatgagggcaatcgtggatgggcggatgtagactggttcagagtcaattaaaaattaagaattagaaattaaagtagatatatcagattaagatgaaaaagattgtagtaggtctggctgtggtgttagggttctgtacgtgtgctcatcagccttccggtacattggatgtgaataaggcattggactactgcgcaaagcagacacaacgtacacttacggaactgaaaacagattccggaattgactatacgatgatgccacgcaatatcatggctgacgaacaacattggaattgtcgtaaggcgacgaaggaggagtggtgtgctggtttttggccaggagtactttggtatgattacgaatatacaaaagataagcaagtgttggaagaagcggagaattttactcactcattgaagtttctttctcatattccagcttacgatcacgatttgggatttcttgtattttgtagctatggaaatggttaccgtctgactaagaatccggcatataaacaagtgatattggacactgccgatacattggctaccttgttcaatccaattgtaggaacaattctttcatggcctcgtgaggtagaaccgcgtaattggcctcacaatacaatcatggacaatatgattaatctggaaatgcttttctgggcagctaagaatggcggtaatccttatttgtatgacattgccgtgtctcatgcggacaaaacgatgaaaagccagttccgtcctgattatacttcttatcatgtggctgtatatgatacaatcacaggcaatctgattaaaggtgttactcaccagggatatgcagatagtacaatgtgggcgcgtggacaagcatgggctatttatggatatactgtggtctatcgtgagacaaaagatcctaaatacttggattttgttcagaaggtaacggatgtttatttggatagactccctgaggataaagttccttattgggattttgatgatccgagtataccgaatgctccccgtgatgcttcggcaggagcggtggttgcttctgctttgctcgaattgtctacctatcttcctaatggaacaggaaaacgttataaggatgcggcaatcgagatgttgacaagtctcagctccgacagttaccagagtggtgaaagtaaaccttctttcttgcttcatagtgtaggacactggccgaatcactcggaaatagacgcttctatcatttatgctgattactattatatcgaagcgttgttgaggttgaaacgtctgcaagaaggatacggagtgcttggataataaggctcttttgaatactggtaagaataataaatgctctgcaagaaagattcattcgttgcagagcatttttactggttaggtttagggctatttattgttttaccttaatgatgtcataattcaaatcactaacggcttcctgtaggctgtcatttaccaatcgaagagttgtatcattcacaattacgaaatacatgggagcttcaccacttttcggggttaatttgactgcagtaacaggttttttgtttaccaccttatgtattgtctgttgctttccattggaagtgaaagtcttgttctgaccttggccttgagcgtccaggtaagtcatatccagtgtgtaagtagtatcaacaccatcagttgcagcattcagggttaacacataatcgatacccggaccgtcggcagcaggaagagtaccggcatagacttctgtcatttcggtaatcggagtcatagcgagggcaagactgtctgcttgtgcctctgcggctttgttggcttttgattggcaagatgccaaagcagctacgacggctgctaacataattacttttttcattgctaagtgctttaagttaatataaatatagtgagctatcgctcggttttactttattcctcttcccgtttgatgacaagtagtttgtctactcgtccccgatccatatccactacttcgaattgcagattcttgtatgtgaagatgtctccggctttcgggatacgaccaatcaggaacattgccagtccgcctaaagttgtgaagtcttcggatttcaggtcttcgtatgataaaattcccatctcttccataaaatcgtcaatgttcattgaagcttctaccaacatcgaaccatcctgccttgtgatgatttcttcttcttccgtttcgtcctcttcaaggatgtctccgaagatactttccgtcaggtcgtgcagtgtgataataccttccgtactaccatactcgttaacaacaactccgaacttgtttttgttcttcttaaatagctctaaaactttatttgcatacaaactttccggaataaagagagggggacgggctatttcacataagttaaacttctgctggttaccgaccatcaggataatatctttcacggacactacaccgataatctcatctttccgctcgtctaccaatagatatttgctgtaatgttcctcttcgatcactttcattaccttttcccgcgtatcatccggatgaaggataatgagatccctgcggtgtgtcatcaactcattggctcgcttgtccgagaagcggaacacatcacgtatcatttccgtttcctctttgtcaatcacaccctgttccgagctttggtgaagaatcatcttaatctcctcctgtgtcatagggcgttcttcacttttcagaccgatgagcttattcaacaaacgggtggatatactgagtaaccagacaaaggggtaggagacttttgtcagcagaatcataatcggactgaataagatggcatatttctccggattactaagagcaatggatttagggaccaattctccgataatgagagaaagataggtaatgactgctaccgtagtaatcatggcaagattacgcgcataagcttcagctcccggaataagggagaatagaggaacgagatcatcggcaatggctactccaccatacgcaccggatacgataccgatcagggtaatacctatctggatggtggataagaacttttccggttcttccaactgtttcagaactccgcgtgcggatttgttacctttagcgacaagtgtttcaagacgtgctttgctggatgataccagcgcaatttcatacatggcaaaaatgccattcagtatgagtaagaaaagaattataagaaattccataaatggattaaaatggttattgcttcgaaattacatgaaatcaagacactatgcaaatctgtgtaatagattaatgattttttaatactagtggattctttttatcggaaaaagaaaaggagatacaaaggttgtaaaaccaacgtatctcctttttccgtccaattcaggaaggatgtctgttattttttagcataagtatccgcctttgctttggctcgctcgattcgcttcattgtatcgggatgtgaagagaacatcttttggagataagaaggtttttctgcaccttctgagagtttcgccagcttggtcagcgaattagccatggcataagggtcgataccattctttacacagaactctacaccataatcgtcggcttcgccttcttgtttttgtgaatattgcgcacctgccaatgcttcggccatagctccgagttcagagtcggtcagtttggcaaccttgtcgctggtagcaccggctgcattctttacagccgaacgaaggtaggcgttcttcatggcgtcttttgaatcggtatgaactacatgaccgatttcgtgacctactacggccatgacttcttcgtcagtcattacatccattagtccggcacagatacgtacactaccgtcaccacaggcaaatgcattgatatctactacttcatatacgccgaagttcagttttagcccgtctacttctttaatatgaccggtcagtttttccaggcgtttgccgtattccgtatccggtttggttaatggattgtgagtgtccatccattccatgtattccttactcatgttggcaatatcggcatcagataatgttacggctgatactacgtctttgccggcttgtaatgctttccctaaattaaactttttgccgaactgtgcagatgctgtcatgcccattcctaagaggataaaggcgatcatagtaatttgtcttttcatacttttaaaggtttttatattaatattcaaatgtaattcctaaggtagggagtaaggtcccacttgactgcttgatacgtttcattctataatgctgactatcggctggagcttccgggttatcgataacaccggtactcatcagtacgtcctgttgttttagtttgcttacggtgatattctgcaaatccagatagaatcccagcatacagtgtttcaggtaaaaagtcttatccacacggatatctacttgggcaaaggcgggaaggcgttccttattatacctcgaatagtcataatatgcctttccttgtgcatcccaggcagataccagagaggatttctcttcatcgtagggggtatagggagcaccaccgatacaactgactttcattccgacactccatagatgcgggagattgtaagttccccgtagattgaagatatatcggttatcccatgcggatgcgatgtattcactttctttattgttacggtattcacttttgaacagggtgaaagaagaagccaggttcaactttttggcaattaaccattttactaagatttctgctccataagaacgcccttgtgcggtggaagttagcagttcattgccaatcactccgtaatcatttcctttgcaggccagtggaatgccgtctacaacggagagcggaatcttatcataatctttgtagaatccttcaatggaaacttcaaaagtatctcctttccgccaactgactcccaaactttcctgactgactttcatatagcggaggttgtatttgttggcgtatgctccatgattgtttttaaatccaagcgccgtatatggaggaagctgataataaagtccggcattgccgcttacaaaccagtgatcggttaattggtaagaaagtgatatacggggtgataattggtcggagagggatttcattgccgatgaatagttattggcatcggcccgtaaccctaaagaagcagtgaaacgttcatccattgaagaataattgacagtaccgaaaattccccatcgtaaaatatccagataggtgtgatagtcgaatatttgtgcctgattcgtgtatatcttttgaaaagttgtattagagtattggctataatctaagttcactccaagattgatttcccagtttcggatagaggttttgttctcgaaacggaacttcgtttcttgttcggtagaacggaggcgaagcattagattgtccggaacactttcgtcattctggcggtatttcgtgttacggttgttcagataactgtggctgacgactattgattgtacatgtgctcctgcgtagtgccggtaaacagagcccaatgtaaacgtctcctgcttgatcttaggcaggtagctgagaatgtattcgttgtcttcactatccgcttttgtgttcaagcgcatattgtcgattcctcccaatcctaaaatagtcagttcattttgtttgttgaacctggttttcaatttgaactgtacgtctgtgaaggtcggcaagaaagggaggtcaagcatatcaaaaaggaattgcagataggattggcgtacggataccagataagaagttttttccccgatatgcccgttggaagcaagggagacttcagaagctccaagtgttgctttcagcgagttgcgttccatatctccgtcacgtaatttgaaatctaggacagaactgagtgcattccctttatctgtaggaaaagcaccggtataaaaattgacttcacgtatcaagtcggcattgaggatgcctacgggaccaccggaagctccttgcgtgctgaaatggttgatgttgggaatttctattccgtccagataaaaacggttttcagaaggggaaccgccacgtacaatcaagtcgttgcggtagcctattggtgaaaaggcaactccgggataagactgtacgattcgtgagatgtcccggttggctcccggactcttttcaatttcttgtagtcctatgatacgcaggctgacagggctttccaaatcacgccgaaaaggggaagcagtgacagtaatgccttcgagctccgtcaggttctcttccatctctatcgagatatttaaattcctggtggacaagatatattcaggcgtagtgacacttttgtagccgatagctgttgcttgtaaacgatagataccgggaggtacctgctctattgtaaagtgtccttctgcattggttacgccacctttattcagtccgatgaccgttacattgataaactctaatggttgacggctgtttttgtctattactgttccttttatctgatgcacaggttgagcttgaatcaggagaagcagaaaactgcaaaaaaagaaaaaggtaagaagtcgcttcatacaattagagtttagtggtgcaaaaataattaaattgttttatttctcgtttataagttctatttttgtgagacctattagacagattctttgatgaaaatgtaaatttgattactggcaatgatgcgatgaaggcacacattgttcagaagacacggaagaattatatattaaaataaaataatacacaatgaaaaaacttctgttaattactctttttctcggttgggcagctctctcttttgctgccaaagtagataccttattgattaaaagtccttccatgaataaggatgtgaaggtggtggtagtaactccggatgtagcatttgggaaaaaagcgctagcttgccccgttctttatctgctacacggctacggaggaaatgccaaaacatggattggaataaaaccgaatcttccacaaatagcggatgaaaagggaatgatttttgtttgtcctgatgggaaaaatagctggtactgggatagtccgctcaatccgtcatatcgttacgagacgttcatttcatcggagttggttaagtatattgacgagcattataaaacgattgctgatcggaaaggacgtgccattaccggattgagtatgggtggacatggagcaatgtggaatgcgatccgtcataaagatatatttggcggtgctggaacgacaagtggtggaatggatatccgtcctttcccgaagaattgggaaatgtccaagcagttaggagattatgattcaaataaagaagtgtgggataatcatactgttatcaatctgatcgatggtcttgaaaatggagatttagccattataatcgattgtggtgagagcgatttcttcctgaaggtgaatcagaatttacaccatcgtttgttggagaaaaagattgaccatgattttattacccgtccgggagcgcataacggacagtattggaataactctattgactatcagatacttttcttcgataagtttttcaagaaataaattgtattgatatgattggtgcattatattagtgccatgattgtgccgcttctttgtcacagttatctttttaggagcccaatggggctctttattcaatggcaattgatatgttctgagtattgatcttattggaataatgtgtgcggctataaatgctcgtaggttttccttcgttgtcgaatgtataagaataagtagtatattcattattattgttttcaggagtggagcgggctaccagatgttgtgtcggcttgcctaagattccgacaaatagggcgcattggtggaatgaaagcggataagtttctaataaatccaaacagggcaggcgatagtaattgattgtttctccggcttcatacattattttattttctccgtaatcagtgaaagattcatttgtcagtgacggggaagtaacactgatcagctctccgtattgataaacaagcgacagggtatgggaagtgttttcgggctgtagtgtaccatttatagatgtaatattttcatgcagttgagttaagtatccgtctgtatatgtaaagttatattggcgtacttgggaaatggtcgtgtatgcacattgagttgcataaccttgttcattcaacgtatatatccatttgttatcttcactatctatcatggtgacaaggttgttctcatattgtaaagttacctgatgagaaagttcctgtacaatttcctcaccaatgctgattgactgtgtattggtataggatgtgagcttattatccgtatatgcatactcattctttatagtgttgatagcagtggaggtggtcatatatgtctcttcaacttcggtcattaccattttagacattgtcggaacaggtatattaatctcattccacgtcttctctttctcatcatcgtcggaacaactgaaaagtagaatagtggtgataaatagtagaactacttttttcattttaaatgttattaaagccttagccctttactgctaaaacgtcggctggctggactgcttacactcttttcgaccttgaagcgagtctgtgttgtactttcttctggagtttcgtcatctttaggcggatatgtaccgtccaatactcctatggcgatcttcagcaatctttcacttttaccatccttgtcgaatgtaccgaatggtaggaattcactgtaatttgtactcccatctattgtggtttcactgacttttaaatcggtagctggagaaatggcaccataagtatcgtgttgggaattgtaaactgtacatactaccgggttgaccgaccatagaaattcttcattaataaactgttctgttgctacattttgtcccttcgtcgaactgcctacagtagcaatgggatatgtatcctctaaaaaaagacttctaatgagcatttccggtgctcccattgtcgttccgctggtaatggcgattaaactgtgtaagtttaaattaatctccctatctgtaccgaacagaatagtggcgtctttatccgtatttttatcattatattcaagataagccattggctctcctaaacggtcggctgaggtcagaatagtacctaacaactgaacacaatccattgaacctccctcattgtaacgaaggtcaagaataacagcttgtacgcctgcttccttaaacttttgcgagacactgcgtaattcattgttgtatttttccggttcggcttttgtaccggctgtgaagctattgtacatgagatagcctactcttatctttttgaccggtgactcaataatctcatatttatgtacgggattgtcttctactatctgtgctgcaggcatttcaacggggtcatctattggaacaactctatattccatcatcggtccttcatcttccccgtcacctccctcatttccgtcttcttcatcttctatttccacctctttccactcgcccaaagtcagttttacggctttagttccttgcaataaatatgtctcatatttcttactaatgtaggaagtgtctactttcatgatccaatcaccgcgttctaaacccgcctgtgcggcaggggaacctggaataacgtaagtaatcaaagcgttgtaggcagtgtcaatatccggatttctaactaatgaataatcaaatccatatgtgggcaatggggttgccataacagagtctacaaatgaataactatcctgcttcgatttcactttagacaggaaagaggcaggttctacaaataaatttacatcatcataggaaggtagctcctgataccatagatagttctgttgcatgatgtctaatatccatgtatccaatgctgtttggtgggcatactccggccagcggtcaacaccacaggagaagaagccactgagagatacgatggtcagggcgggtataaggattatctttcttaatttcgtcatcataaaaagcttttcacgttgcaaatgtaggaaatactttgcttatctaccacatttatggtataaaaatgcctttaatgtgtgattggctgttagagaatcctgcgttatctttgtgcttccaaaattatcaataggcattagtaaaatagaataagtgattaataaacggtaatttcatgaatatagctgcattgttatcgggaggtgttgatagttcggtggttgttcacttgctttgtgagcagggctacaaaccgactcttttttatataaagatcggtatggaaggagcggagtatatggattgttcggcagaggaagatattgaattatcggctgctactgcccgaaagtacggtttatctcttgaaatagttgattttcataaggaatactgggaaaatgtagcgacttacgccattggtaagatccggcagggattgacaccgaatccggatgtgatgtgcaataaactgataaagtttggttgctttgaacaactcatcgggaaagagtttgattttacggctaccggtcattatgctactacgatacagcgtgatggaaaagtgtggctgggtacagcaaaagatcccgtaaaagaccagacggattttcttgcacagattgattatctgcaaatttccaaactaatgtttcccattggaggattgacgaaacatgaggtgcgtgaaattgcagatgcggctggattacccagtgccaaaagaaaagacagtcaaggcatttgctttttgggaaagataaactataatgattttgtccgtcgttttcttggcgagcgggaaggagtgattgtagaattggaaaccggaaagaaactaggtacacatcatggttattggtttcatactatcgggcaacggaaggggcttggtttgagtggaggtccttggtttgttgttaaaaaggatattcaggaaaatatcatttatgtatctcgcggctacggtgtagagacccaatatgggaatgaattccaaatgcgtgattttcattttataacggataatatttggaagggtcaggataaagaagtggatataacctttaaaattcgtcatactcctgaatttactaaagggaagctcattatgaagggagataatcagtttcatatcctatcttctgaaaagttacaaggcattgctccgggacagtttggagtgatttatgataaagaagcgcggatttgtgtgggaagtggagagattatctgttaaatagttctttttgagtggcgaagattgaataaacaagattattttcattacttttgtttcgtagaattataaataaaggaggtttgattatgacaacgatggaattcccaacaagatgcggtgttaaaccttctttatatctatgataaggcggataaggctcttgaaaacacatcagatatagtattccgctaaatcaacaattcccgcccgcatggcatatttggtggcttcatgcacattatttacgcctaacttgcggaagatatttttacggtggctgttaatcgtatgaaaactaaggtttttctctgctgcaatctcttttgtcgttttgcccagtgcgatttcttttagaatattcttttctgtttgcgttagcaaatgattgtctgtggatgaggtaacagacggagagccagttcccgaaagcaataggttgctgacatgattgcagatatatctttgtttgcggatagcgcattgaatagcagtgataatttcttctttggaattatctttcattactactccaaaagccatgctgctaaataatatttgtcgaaggaagttgagacttagctcatcggagaatagaatccaatcggcctttttaaacctttcctgcagaacgatcagttcatctgccccggcaaaattgaatagtgtgtaatcaagaataaccactgcttgcggatacaatcgcagcaactgaatcagctctgctttattatcggcttctaaaagtgcggatacatctttttgcttggtcagtaggaacatcattcccgctttgctgatatcttgattgtctgcaatgataaattctctcataataggaatagctaaataaaaactccgctacaaatgtacatattttgtgcgatttgtagcggagttttaattagattcttgaattccgattaccaggaacgtcctttgaagatgttggattggtcaagcggaacgatatttccgttcaatgtcagattgttgttattgaagttcgggctgattgtaaccgaagctgtattatttccactgctcatgttgataaagacctgagcggaaataccaataccttgaacgctgaatgaacagttcacatttcctttcttgtcaatgttcattttcatatcagaagaattaccatctacagtgacaccaccgatcccgttaggacctggataagctgtattgaaagcagtctgcacagtggctctgttgccattcatcaagacgaagttggtgtttgaagtcacgaaagcactcattccattgcggaagattacttgattggcttccaatacaaattgcttgttctttaaagcctgtacagcttgttgataggctgccatgtcctgtacttgttcttcggcgcggagtttcgctctttctgcgtctctttgaacttttcgttctgcgcggcgggttgctgcgttactttcctgtgcatacatcatcgtgcttgcacttactaatactaatgctaataatgcaataaactttttcataacttttttttgtttaggtttaatacgttgtccgtttattgcaaaaacaaagagtatgccggattgttcacgaacgtcgtgcaattttgtatccgatagctgcgacggcaatactcattaaagggctgataatgttgaaaaagcaatagggaagatatacaagtgtgggcacacttaaaatggtggcctgagtcatcccgcaactgttccatgggatcagtacggatgtaacggttactgcatcttccgtcgtgcggcttagtaagcaactttcatatcctttcttggcatatatgtcacgaaacatattccccgtcagaatgatactgatatattggtcggctgttgccagattaagaaacaagcctgagcaaaccgtacctcctaccacactgaccgtctttttcataaatcgaacaaagattgaagtgatactacccaacataccgctggccgtcattgctccaccaaaacacatggcacacagaatgagccaaatcgtattcagcattccggacatgccgcgtgtggcaatcaaatctgacagaacggcattgtctgtgtgcagacttgtacttccatatatcgttatcattaatcctttgaacaatgaatcgaagccggaagttgccattccggaaacctcctgtaataactccggctggaaaatcaaagcgaagactcctgccagcagtgtcgataagaacagggtaatgatggaaggaatcttacgggcgattaatatgcctgttgcaataggtacaatcaagagccagggagtaatgtggaacttttcattcaaagcagttgccacttcggtgatatgttgtgtattgctggcatcgtgtgagaatcctgccacagtaaaaataatcaaagtgattatgagggaaggaactgtcgttatcatcatgtatcggatatgccggaatagtggagtatcagttacggaagctgccaatatggttgtttccgatagaggcgagaccttatctccaaaataagctccggaaataatggctcctgcaatccatccctcttcaaatccttgtgccctgccgatacccatcagtgcgattccaatggtagcgatggtagtccacgaactaccggtcataacggaaataagtacacaaatgatacaggtggatgctaagaagaaactgggatgtatgatttgcattccataataaatcaaagtaggtactactccgctgatcatccacattccacttaatgcaccgataatcaatagaatgataatagccgttgccactccggccacattgtttgtgatggcaatctcataatctttccaaggaattttgtagaatgccataccgataagaatacaaatagcggtagtggtgagtaatgatacttgacttcctccacttaaagcatcactaccgaaagtatggatagtaccgaataataatagtataagtacgataattggtatcagggatacaaaaggggagggggcttttttcatattaagttctttaatgctctatattattttggtttgcaaagatataacaaaatgatcgaaattcttagcgttatggaacgaagcaataaaaattagtataagtttatatattcttggtacatagaatcagtcccaatttaccttacgttttagccaccaatatcgtatgaaaagtattccggtcagaatcagagcgatagatagtccggtgtagaaaacggaaataaaactgtcgggtaatagatggaaactccggatggtaatgcctagagagatcatgaatatcataatgatccaactctttacatcaaaaaaagaaaaagggcagttacgggttttctttttctcgtcaattcgccgggtgtgtttataataaagtcttttaaagatgagtacgaagaataacaggaaaactacagttgcttctccgattttgaacatccagtcttgggagttgtttaaccatgtaatgattcctattcgtaatatattgataccggctgtaatccatactgcgccggctgtaatgagtaagatttgtttgttgactccgtatttcattcgctttacttttttgctataaacggttttactgcttattttgttgagtcatttcttatgatttataactcattttatgaaaaaagtggtggaaaccgtattcccttccccatcaacggctgtcagagagtgttttcccggttcaggttgcaaggatattttgtgaaaatcctgtgtttgcatcagatatatatcatcgagatgccagaaaacgattgcttcgggattgttgtgagccagttcgacagtgatgaatcctttgttaccatccaattgtttcggtagcttgattcgtgcattcattggaggataaatgaattgcatgggttggaaactatcttctccgcaacctgatttgaacggaggaagaggcttgtattccggatgatgctgtttataataccattcccacacaggaggcagtgcgaaccatgacctttggaaagtaggctccgtattggcacaattctcataaatacgatatttctcgtcggcagataaagtaatgaagtgatgatatgggcaggattccgttcgcagtccggagggaagtataagcactgtgtccgtctcctcgcagaagcgtcctttcaaatgaccggattgacggcatacctctgcatcaataaaaacaccggtcggacgttcaaaccacgatgaagagggaagatagttgaatacatcgaataatacgggacctgccgtttgtgcgcccactaatcccggttttccttcaccggttgagtttcctacccatacgccgactgcgtaacgaggagtgacgcctaccgcccaagcatcccggaatccataactcgttcctgttttccaggcgatggtctgcatggaagggatggacttccaatcgatctcttcggggcggttgacttcttttagcgcgtcgaaagtttgccacactgcacccttgtcccaagtgaatttttgttgtatcgcttcgtttttgttctcttctcccattaagatgtcggcttctttttgagggactgcatcactatgctgattcggaatcaggcttcgtcccatttgtgcgtacgcatttgttacatcccataaagtggcttctgctcctcccagaatcagggataaaccgtagtgggacgatggacgggtgattgttttgaatccagtctgttgcaggaaattatgaaatttgggaacaccatatttttgtaacattgtcacagctggaatattcagtgaacgggaaagtgcttccgaagcgggcacagccccctcatactgcctgctgaaattctgcggactgaatccatttatgttaatggggatgtcaggaagtagcgtatgtggcaataatgccccctcctgcaacatcgcataatataaaaaaggtttcaaaatacttcctgtgcttctgggagcttgaattacatccacctgattacctccttgccgatggtcgaaatgtacattcccgcaataggctatcacttgattggcagggaggtcgattactaaaatggccagattgcggatatcgcttcggttaaattcattgctccaacgttcagcgatgttttctatatgcatttgaatcccccggtcaatggtggaatgtgagtactgtccatttctttctttgtagaaacggctgactaagtggggagctgtttgcggaagaagatgtggctcttcgggaagaggctcgctgacagccaactcataagtagacgaatctatgatttctttctcatggagcagtttaaggacccggttacgtttggcaagtaatgtctcccgtcctttggataggtgaatcatggctggagcattgggtaatacggcaagcatggccgattccgcccatgacaactcttcggctgaatgaccgaaataacgccaggcggccgcatccagtcctaccacatttcctccgaaaggggcatgagatatgtacatggataggatttcttctttagaagccctgaattccaaacgtgtagcccagatcatttcgattattttctctccgaaagttctgggcttgtttcgtgcaagccggatagtttgcatggtcagtgtgcttcctccgcttacaatacgtttgttcttgatgttttgatgaacggctcttccgatggcaagtggattaacaccccaatgatgatagaaatgtttgtcctcaaaagtgataaggcagtgttttattttctccggtgtcgtattcctcggagggaaacgccactgcccgtcggaagcgatacgtgctcccaacagttcttcgttcctatcagtgacgacagtcgagtaggggacatgaaagagttgtcggggaagacaaaacatatatcccatcaccaagagagtaatactgccaagtattactctcttggtgatggataaatttctgaatacctcggatatcttaactttcatgaattgcgtttgttcttaccaacagaattcgtattagcgactcactgttgttcttcctgctttgcttcgtgcctgcacggttgtatcatacatggcttcgcactgaacagccggaagaatgaagttaccggtgtatgccgcttgcaatctgatagtaaatacctttgtctcaccacggtacaaattgaaataggtcaatacacgatcgtcgcggatatcctgataggagtaattgatagctgtaccggcagtcgccattcgttcattatatatttcccacccggatggtataatatgtgtcaatgccagattagtataatccgatgttccgctaatattggatatggaaacgacagcggtaaagtcagttccttgtttaatttcttctgcggatatgggcgtgccgttcagagttgcatatcttatatccatccgaagattgtctgagatggcgggcaacgtatcgttcagcaattgtgtgcgcgtgataatgtctactcccaatgctcccttgccttgattctttacagagactgttccggatttcggtgaagtaggaatctctttgtcaaataccgctttggcagatttcacggcaggttgttgcttgccgttccatctccatgtgaaatcaagtgtgcctgataacttttctgccaagcgtcccattgccatgagggcaaatgcggtagactgagtactgaaatagtcctctagtgacagattctgcgagactttctttgcttgttgaagtgcatcccgttcccggttcatcaagattaatgtttccagaatcattgcttcatcccggtcggacgaaccgtaaataaagttcattgaagaatagggagtgacactggttgctgtcttatatgccaattcctcggctggtttcatttttcctgtcaatgcgtaggcggctgccaatctccatttggcttgaatagataatccttgctgttccttcattctgttcatagctccgtactccggcataccggccaatgccagcgtgtataggcggaaggcttgcatcagctccgactgccatagttgccagctgtttgcatcctgtggcatacgccagttctgggctgctgcacgttggaagtgtttccacttattcaatacgtttgaatggacggcatatcccttttcttgtgccaatgtcaggaacattccggtatatgaactgatccattcgtctgcgacggcattccccggccaatagacaaaaccgccattgggaagttgccgggcataaatctgacggatagcctcctgtacatttgtttttattttctctgcttcctgttcgtttaccgttttaaattgagagataaacaaaagcggcaatgctttggaagtcaactgctccgtacactgatgttggtaatcgtataagaagtcgaatcgacgtgtgatatctacggatgggatgcgggatacttccaactgaatatgattgttgtcggaaaaaccgcttaggctatacgatacctctccactttgtccggcttccacccattggctgttgcgcaatgtcacgaccggattcggattgcgtacgtctatttcgatggtttctttagtctgctgtccacccccgtttgccgtcagatggatagttgctttacctgttttgtttcctgtcttcaatgtaaagaatgtaagctggtcgcccagttgattgaaggttagcgactgttgcgaaggtccggcaatttgtactcctccaccggaaacctgaatagatacggtgacattctttacctgattttccattgcaaagatatttaccggaacagtgatttcctcttgaatactaagcacgcgcggcaaggtggaaagcagcattaacggtgtccgtacataggccgtcttttctgcatttccataagcaccgtcctgtcctgccactaccatagcgcgtacagaacctacgtacatcggaagtttcaatgtatgtgtctgatgtttgctttttcccagatagaaagggcctatgaatttaacgaccggtttgaaccggtttgcttttgcatctgccggtttcaaaactgcgtccccacctgtactgaaaagagaaccgtaacttccggcggaagctcccaatacgttgtcgtacatatcccatgtccggataccgagcgcttcgcgtgaatagaagtcattccaaggatcgggtgtcttgaagttcgtaaggtccagcagaccgtcgtctacgatagccaatgtgtaagtcatcggtttcccgctcttttcgctgacggtcacattgaagttcgtttccggtcgtagcacttccggcatttgtatttgcggtcttaatattgtttgactgttagttacgaataccgggacaacaccatacatacggataggcaagtcattcactgtctgcgcatgaggctgcaacaagctgatgtgcagatatacattcggagccatttcttctgtgaccttgaacgtatattttgtatctcctttgctggaaacttcgatccattcctgtttgagtaccgtcgatccgttttcgatggataccaatgcacgtccgttggctgctgcggggataatagccatagctgtttctcctatctcataggaatctttgttcaatgagaaagcaagcattttaataccactggggtccgatttacttgaacgtcccctccattcgggccagtctacgtagacagtacctccggtggcatgtccgctttctttgtctttcacatagaccagataacgtccccaattgggataatcgacgcggaatttgaaagaagcctttccattgttggtttgcagactcccgctggctaccggagtgatggaagttccgtttatataggaactgaaagattcttcattgttttcccaccaccagctccaactgatacggtagattttatattccagatttgaacggctcaccgcctgtccttccggattcactgtcacaatgtcaaatacatgatctttgtccgtttctatgtatttgccttttggctgattcaagttaatgcccacatacgatgtgaacggagagaaaggaacgctttgggtatagatactggcatctcctcccggttcgaatacacgggtggtgaaagatgcgtttagcatacccggcgcattggttgctgcagggagttttaaagtgactcccgctcttccttccgcgctgagcattccgtcaaacatatttgtcttgatggtagtgaaatctgtagccggattattgaaaatatactgtccgtagtttttaaattgtgtatttactttagacagtgacatctctactttggttttcagatgtgaagccttagcccctgtcagccaggcagaagtgagtggaacatagacttctttgtctgttgcttgaagaattctaggcaatgccaacgttattttaagtcggttgggttttattgtttcgatgcgtatccctttatggaaagtcgaaccgcctacttttacgtatgcgttccacagaccggtaggggcatctgcctgagtagggacagtaaatgtgtaaaagccattcatcccttgtgttgagatcattttggtatagaattggcctttcggattgtagatttccagcgctaccggatgtttgtccggtattcttttttcccggtcttccagaatgaaagatatatgtaaggtgtctcccggtctccatactcctctttcaccatacataaatccttttaagcctttttgaatatcctttccacccacatcgaagcggctgaccgattgctcttcaccgtctgcaacacgtacgtaagctttttgtccgtctgcctctgctacgataatgaagggaactcctttcggagcgatttccgccaagccttctccgtttgtttctcccttaccgatggtttgtaactggaaattgtaaacagttacttgcgcctttccgacaggttttgtgtccaaaatgttgtttactgcaatccacagattgttcaaggagttcttctttacgagcattcccagattagaggcaaagacattgcaggtggctgtccggtctgctcccatataataggacgggtggcacggattatcccgttctttccaccgatacaaactccagtccatagtttcgccgttgtaataataataagcctcaggagtgtcccatacagcttcgtctgcctctgacaaaatactaccgctaacttttgtcagaccgtcggaagtcgtgtcggaaaacttcatttctttgttttcttcacttccaccgcaaggataagcggaatattcttggcggaaagacaggataacccggtagatggcgcccggttcttgatgaatcagtccggcaaggtcgatagagtaatcttcccattgatgaatatcttttgatgaatccttgcttagccacaatgttttcttataaaccaggcgtcccgaacggcgcaactcattggcagaggccagagagttgttttgcatgaacatcaagatgttactctcaaagatgcggataacctttaaatctactgcatacagattgacagcgcggaatggaataatcaggcttttcgaatcgggaagaatagcggctgaggtagccatctctacttgcggtttcagattcaattcgctgaatgagatagagtgggaagtccccagactacggtcttgactgctttttattccttcatggatattcaaagtcagtttatttattttattggtttcaaaatagataagaacctgattatccttaatttgggtgatgcaagaagatacttccggtatctcgatcagtcctttcagatcttgcatattggatatgggagcagagaatatgacttcgatcccgttttccggttggtcaatgcgtttggcggtcagaaagcggaaactatcttttgccggaatcatgatttcttcgatttgcgtatggtcaattccggcgggattgccgtttgctgtcagttggatttggtaatcttccgcttcccgcaagatccggttgatactgaattcataacgagtcggattgttggtggaggtaatatcgaccggataatttttacttttgccattgccggctatcagcattttctcaacttcttctttctttacaacgtcactaaagcgtatttctccttttatgttcacttcgtcgggttgagtagctgtaatcgttataggttctgtatgaattgtgaagttacgttcctgcacccggaatgagaagttaaattcctttagctttttatctacctcgataaaatctccaagctggaaagttccttcgtagaatgctcccggttttaaagtaccttcttccggaacaaattcgatggtgttattgctaatccaatatgcttttcctttcaaagacggtgaaaagctgaacggattatcttttaactcattatttacgtcaaccataggttgatcgtgtgtcagctcgatgcgtatagtcgaactttgggagatgactcctcctgtgtaggcatttacatagggggcatattttgcagaggggatgatgtctttcggactgtgcatacatgcggaaaaggtcacaatccacattatgaaaaagaatagtttggtagcgaggctgctacgtccagtttttatttgtcccatagcaaagagtttttattggttcagtggacaaatatactgtttttataatagattcttttatagacaggggtatttttccttcaactttttcatgaaggacttgcttacttgtaggagctcggcgtcattaaaaggggggagtaatacacaattattgtcttcaattgatgccagatagctgatattaataatgtaggattgactgatctgaagcaaataagggtgtaaactcaatatcttttgcgagttcgtgtttctttttaatatcagagtatgtttgttggataacatgacttcccacaatttgctttttgagttatagcggaaataaccgatttcttccaagtgaatcagttgcaaatttccggtaatagtggtatataaaaatatgctttcttgatgttgcgtaatttgtgtctggtcgcaatgttcaatgtttatgtgttgattgttcatgatattaatttattaatttcccgtgtcgtaatttttattttctgtcaaaagtaacagattactcttaattataaaaatgaaaagtgtctcattatagaaatgagacacttttattattaagatttgtacgttacagaatagaattattctatttactttgttgatattcaatgaatttactaggagaaataccatatctttcggaaaagttccggtagaaggttgcccgtgagctaaatccgcatgcaaacatcaactctttcacattctttttcggattttgggcgattagttgtttgaaatgctctagtcggatataattaatatattcacggaaacctgtaaatccctgacttttgattgcatccgaaatattgcgttctttgtcatttaaggcttctgccaaatcttttatactgtatttctgatctgtgtaaggatgttctttctttaaataactctcgattgtggtgaagagtgtgagtggctgaaatgagtttctcatttcttcaggattttcttcttctgtattatacaccatactgatatggtctgaaaacggattctcatatcgtaaatatagcattgaaaataaaacagtaaaaacgattgctgtaataccgaataaattgaagataaactcattaatgcttaatgtgaataggatgtatataccaagaaataggaataagaatcccatgaatagatacatgtttctattcatcttacgatgtgtcttaacacggctggtgacataaatgagaataaagagaggagtgatgacagaaagcaggaatatactgattctgagtttgacatccatattaccgatattgggcattatttcatttagtgaatggatagccgttatgttgccattgaagtacagatagcagattcctaccgttatggtaatgataggaggcaataagaaggtgaatattctgaaatggttgaaatatcccggagataaggatgcgatgggaaatagtgctacgatattggccaaagcgtaccatttaagcattttatcaatattgagcaattctgtgaagtcatattccggggtgtccgtgacaatcgtcagccatccgatgttttcccatgaaaacatgaaccctataccgactgctatgactccccaatataattgaggataattgtctttggcacgaatgataagaataatccccgatataagggcaatcaaatcaagtgctagttcaactgataaatgtagtattcccatgtttataagtcttcacctgcatatttaaggctattaagtttaataacgtgattatgagtttatgcaaatgtagttgttttgtttctatccaacaaaattcggttgataaattgcatttatttgcgtacttacaaaatataattagttaattctaaaactgatcttcgtagcgtttccaatatattaggatgatatgccaaaatttgtgaccgtttgttagaattgaaatagaagtaagcattataggtatataaacaataaatccccataaccttattagttacagggatttagtatatagcaatttattaaattacttgctcaaagcctgagctacgtcaaccgcacaagctacagtacaacctaccatcgggttgttaccaattcccaggaatcccatcatttctacgtgagcaggaactgatgaagaaccagcgaactgagcgtcagagtgcatacggcccattgtgtctgtcatgccgtatgaagctggtccggcagccatgttatccgggtgaagagtacggcctgtaccaccaccggaagcaactgagaaataaggtttgcctgcaagaacacgttctttcttgtaagtaccagcaaccgggtgttggaagcgagtcgggttagtagagttacctgtgatagatacgtctacaccttctttccacatgatagctacaccttcgcgaacatcatcagcaccatagcattttacttttgcacgaggaccgtcagagtaagcgatttcgcgaacaactttcagttcacctgtaaagtaatcgaattgagtttgaacataagtaaagccgttgatacgagagatgatctgagcagcgtcttttccaagaccgttcaggatgcaacgcaacggttctttacgtactttgtctgcttttgcagcgattttgatagcaccttcagcagcagcgaaagattcgtgacctgccaggaaagcgaaacatttagtttcttcgcgcagcaacatggcagccagattaccatgaccgataccaaccttacggtcgtcggctacagaacccggaatacagaatgcttgcagaccgataccgatagcttcagcagcttcagcagcatttgtgcagttcttcttaagagcgatagcagtacctactacataagcccattttgcattttcaaaacagataggctgagtttcttcacacgttttataaggatcaagtccggcagcttcgcagattgcattagcttcttcgatatctttgatgccgttagcgttcaaggcttcgataatgcctttcatacgacggtcttggctttcgaattttacttctctaatcatagtttctttcctccttatattattcgtgacgtggatcaatagatttaactgcaccctgttctgctgttacgcgtccataagttcctgtaacttttttcaaagcttcgttcgcatcggtacctttcttgatttcgtccatgaacttacccatgtgtacgaattcgtatccgcagatttcgtcgttcttgtccaagaagatttgtttgatataaccttctgccatttcgaggtaacgaggacctttagccaaagtaccataaagagtacctacctggctacgcagacctttacccaagtcttccagacctgcaccgatgatcaaaccaccttcagagaaagctgattgggtacgtccgtaaacgatttgcaggaacagttcgcgcatagcagtgttgatagcgtcgcaaacaaggtcggtgttcaatgcttcaaggattgtttttcccggaaggatttcagcagccatagcagcagagtgagtcataccggaacatccgatagtctcaaccaaagcttcctggataataccttctttaacgttcagtgtcagtttacaagcaccttgttgaggagcgcaccaaccgataccgtgtgtcaaacctgaaatatcaacgatttctttagattttacccatttgccttcttcgggtatgggagccggtccgtgattaggacccttctttacaacacacatgtgttccacttcgtgtgaataagtcataattagctcttttttaagtgatataattaaaaatacgtagtcacgattctctaaatcgcccacaaaggtagtcgatttatttgtttctgcaaaccgccttttattacttttttgtgaaaagagataaatccctttatgtttttctcagtttgtaaagtcgggattgcatttgccgaactactgctattattgacattgtctattaagggtaaacttgttttcttcttatcgtaaagttcttttcacttaatctctaagttgctttagactactgctaaactataaacgaaggcttcgtttttataaacgcaatcttcatttgtataatcaaagcctttgtttttataaacggaactttcatttatagtttgtatgcaatcgaagtaaattaattatcagttgaaagcaactttgtctatgctggagtgagacttatctggtaataaataaaggtgatgaacgtgtcgattttcggaagagaatagcaggatatatttgttaaatggtctaagtatgatcatttgtgagccgaaattgaagttttggtggagaaaagtgcaattcttagaataaacggataaaagatgactttttactgaattgattgattttcaatatgatagtttgatgtggtgaacgttgaaagtgataatatagttcgtttgtcactttattgtcatcctattgtcagtgtctattgtcatttttatctttcttattatcagttgattaactcgtgaaaatgacaaatgacaataaaactggcgttttaaaaccttatgtagatattagcttataattcgtagggctgcaaatttatttatgtttttcgtacttggatataggatgaaattcgtagctttgcacatcatttatttggaaagaactatgatagaagtaatggagtccgctttgcaaaaagctgcgggtgagggaatggatgaattcatccaagtgtttaccgataaatataaggaggtgattggtggtgaactgactgccgaaactatgtctttgttaacgggggaacaacattctttactcgcttatcagatttttcgtgacgagataatggttggcggattttgtcagttgattcagaatggctatggcggatatatttttgataatccgtttgctaaagtaatgcgttcatggggagcggatgagttgtcgaaattggtctataaagcaaaaaaaatatatgatgtcaaccgaaaagacctggagaaggaacggacggatgatgaatttatggctatgtacgagcagtatgaggcttttgatgagttggaagaggcttatttggagatggaggaacaggttacggcatcggtcgcaagttatgtggatgaccatttagacctttttgcaaaaataataaaatgatgaatgcagtattttttaagtctttgcatttagtaagtgtgaatcagaatttatatctttgcaaaatctaaaaaatatgtttatgaaacagatgaaatttttattagtagctttgatggctgtggtgatgagtgtgtcggtgacttcttgtatgaatggagacgataataacattgttcaacgtggtattttcgttaagaatgattatacttcttttgtcgctgctgacggaatcaaaatagtcccttcttcaggtatgaatactttgttgactggtacttattattatattgcttgtcagtatgatatgtcgcaatttacagaaaattccacttctttgtccgttactttgttaggagaaccgatttgcattgatcctaaatcaggagaaaatccttcttcgtctgcccgatcagccactaatccactttacgctttgagcagtgaactaaaaagtggaatgatatattttgataagaatacgttaatcatgcctattgtgttttggtataagtcagattcggattcagaaaaagtaaatgctgaattagccaaacattcgttttacctctcttatgatacagaagcgattaaagcggatgatacaaaattggtgttgactataaatcacgttgttacagaaagtggagaagaaaaagttaaacgagagacatatacaagtatttataaggcatatacgttgacaagtgctttggatgcattctttagtaaaacaaagaaagttccagaatatattgttttacaggctaagactaattcgagtgaagataaattgaaagaaaacgacgaaaaatattcaacgttggaattggaatacccttttgataattaaacattgaactacaaagaactatttaacatagcaatgaaattgatttcctctccggctaaggcttgggaggaaatttctatggaagaggataggcgaaaagtatatatggcttttgtttatcctatgattggtttatgcggtctgtccgtattcattggttcgttactgaccaatggatggggaggtccgcaaagtttccagatagctatgaccaattgttgtgccgtagcggtagccctgttcggaggctattttctggcagcatacgccataaatgagatggggacgcgaatgtttggtatgcatagtgatataccattggcgcaacagtttgcaggatatgcgcttgttgtaccattcctgctccagattgtaaccggactattacctgattttagaattattgcttggctgctgcaattctacatcgtatatgtggtatgggaaggagttcccgcattgatgggcgtagaagaaaaattgcgattgagatacacccttttctcatctgcgttgttaatactatgtccgacggtgattcagattgttttcaataaactgacagccatacttaattaaatgtgtgaagatgaaacaaccctctgtaaatataaaaaataaacgggctacgtttgattacgaactgatagatacctatacggcaggtattgtgttgacaggtacggaaatcaaatccattcgtttgggaaaggcaagcctggtagatacgttttgttattttgcgaaaggcgaattatgggtgaagaatatgcatattgccgagtacttctacggttcgtataataatcatacggcacgtagagagaggaagttgttgcttaacaaaaaagaattggaaaaactccaaagagaaatgaagaatcccggctttacgattgttcccgtgcgtttgtttatcaatgagaaagggttggcgaaactcgtagttgccttggcgaagggtaagaaagaatacgataaacgagaatcgatcaaagagaaagacgaccgcagggatatggcaagaatgttcaaacgatgacatgataggataaatgaaaaagacaatttctcagattgtatccgaacgcatccttatcctagatggagcaatgggtacaatgattcaacaatataacctcaaggaagaagattttcgtggtgagcggtttgctcatattcccggacaattgaaaggaaacaatgacctgttgtgtctgacacgcccggatgtgattcaggatattcaccgtaaatatcttgaagccggtgcggatatcatcgaaacgaatacattcagttcgaccactgtttctatggctgattatcacgtggaggaatacgtgcgtgaaatgaaccttgccgcagtaaaacttgcccgcgaactagccgacgagtatacagcgaagaatcccgaaaaaccgcgttttgtagcgggctctgtcggacctacgaataaaacctgttccatgagtccggatgtcaacaatccggcttatcgcgctttaagctatgacgaattggctgcatcctatcagcaacagatggaggctatgcttgaggggggagtagacgctatcctgattgaaaccatatttgatacgttgaatgctaaagcggctatttttgctgccggacaagcaatgaaaacaacaggtgtcaaagtacccgttatgttgtcggtgaccgtatccgatatcggtggaagaaccttatccggacagacgttggatgcgtttcttgcttctgttcaacatgccgacatcttttccgtcggtttgaactgttcgttcggtgcccgccagctgaaaccttttctggaacaattggcggcacgtgcaccttactatataagtgcttatccgaatgccggtctgccgaatagtctgggcaaatatgatcagactcctgcggacatggcccatgaggtgaaagaatatattcacgaaggattggtcaatattatcgggggctgttgtggaacaaccgatgcttacatagccgagtatccggctttggtggaaggtgcgaaaccccatattcctgttgccaagccggaatgtatgtggctctccggacttgaactgctggaagtgaaaccggaaatcaattttgtgaacgtcggcgagcgttgtaacgtggcaggctcacgcaaattcctccggctcattaatgagaagaaatatgatgaggccctttccatagcccgccaacaagtggaggacggagctttggtgattgatgtgaatatggacgacggactgttggacgcaaagtcggaaatgacaactttcctgaatctcatcatgtccgaaccggaaatagctcgtgttccggtgatgatcgactcttctaagtgggaggtaatagaagccggattgaaatgccttcaaggtaaatcggttgtcaactctatttctttgaaagaaggggaagaagtctttcttgaacatgcccggattgtcaaacagtatggcgctgctgccgtagtaatggctttcgatgagaaaggacaggcggatactgccgcccgtaagatagaggtttgccaacgtgcttaccaccttttagtagataaggtggggttcaatccgcatgatattatctttgaccccaacgtgcttgccgtagctacagggattgaagagcacaataattacgcggtagattttatcgaagctaccggatggattaaacggaatcttcccggtgcccatatcagcgggggagtcagtaatctttctttctcgtttcgcggcaataattatattcgtgaagcgatgcacgccgtattcctttatcatgctattcagcagggaatggatatgggcattgtgaatccgggaacctctgttctgtatagcgacatcccgacggacgtactggagaagattgaggatgtcgtgttgaaccgtcgtccggatgcagccgaacgtcttattgagttggcggagtctttgaaagcgaccatgaacggaacaaccggacagacagctgtcaagcaggatgcatggagggaggactctgttcaagaacgtttgaagtatgctttgatgaaaggtatcggtgattatctcgaacaggatttggcggaggctttgccactctataataaagcggtcgatgtgattgaaggtccgttgatggatggaatgaattatgtcggtgaacttttcggggcgggtaaaatgtttcttcctcaggttgtaaagactgcgcgtaccatgaaaaaggccgttgccatcttgcaacctatcatcgaatcggaaaagacggagggaacgacctctgccggaaagatattattggcaaccgtgaaaggcgacgtgcatgatattggaaagaatatcgttgccgtagtaatggcttgcaacggttacgatattgttgatttaggagtgatggtcccagccgaaaccattgtgcagcgggctattgaagagaaagtggatatgatcggattgagtgggctgattacgccgtctctcgaagaaatggctcatgtggcaggtgaacttgagaaagcgggattggatattcctcttttgattggtggagccaccacgtcgaagatgcacacagcattaaaaatagctcctgtctatcatgctccggtagtgcatttgaaagacgcttcccagaatgcgggcgttgccgccagattgttgaatccacaggcgaaagccgaattggtaaatgagttggaaacggaatatagagcgcttcgtgaaaagagtggtttgctgcgtcgtgaaaccgtctcattggaagaggcccagaagaaccggttgaatctgttttagcattctgtataagaaaaaagatacgttataatcagtattagtaagcaaaagttttgtcttttcgataaattccttacatttgcgttctgattaattcatatctaatacgtaaatgtttggaatagacgacccttttatcattttgccgtacctgctttcagtggtatgcgtggcgtttgcggcctggttcgggctggaatattggaataaggacgacgaaaaagacgaaacacgatgaatacatttacacttggactgattgtggtagcctatctgctgtcactcgcttatttaggctttctgggatataagaaaacgacgtccgccagcgattatctggtaggtggccgtcagatgaatcctatcgttatggcactttcctatggggctactttcatttcggtgtccgctatcgttggtttcgggggagtggctgctgctttcggaatgggaatccaatggctgtgtttcctcaatatgtttatcggagttgtcattgcctttatctttttcggtttgcgtacccgacgcatgggggtaaaactgaacgtgagtactttaccgaagccaataaggaattgacggcaattgctccgttagttccggaaaagttcagggtattgggacatcaaaggtggacggcaatgccagtgaccggttctccgcaatggtattcattggttacttcccttattctgggagtgggaatcggttgtcttgcacaacctcagctggtggttcgttttatgactgtggagagcagcaagcagttgaatcgcggggtgttcatcggttgttttttcttgataataaccgtaggagctatctatcatgccggcgcattgagcaatctattctttttgaagacggagggtgcggtagcaacggagtatgtctacgctcagttcacaattccatacgatgggggggcttccgtcggttccgatatttatggaacgtacaaaccccgttcgcgtgataagttgactaacgttattcgtcttggggtactgttttctatcttggtcagttatattatttgttatatgcttccgcatgacatcatagcacgtggcacttctatcttcatgggaatctgtgccgctgctttcctgcccgcctatttctgtattgggtatctgtaaggcgctgtttggcagggatgtgctgatctccacctatcctttttcgatcatagatccgatattgtttgcgttgcctctgtctgtgttggctattatcggagtcagcatgatgacctataagaaataagtattacgctttgattttctttttgtaggattcatagcgcgacaggatgtcacggacaaaattataagtttctatgccacgaaaatatccgtttttacagatcgggtcggtgaagtactcttcattgctcttgagcaagatgaagttttctacattgtctttccataccagtttgttcttaccgtatttctcggccagtgccatcgcatcataaatatgtcctaatccggcattgtaggaagccaggataaaactgagacgttcctgcttatcgggaatcatgctgagactacggtcggtagctgcgatatatttgactgccgctttgacgctttcttccggattctgttccttcccgggcggaactcccatagcccgtgcggtagcgggcattaattgcatcagcccttttgctccggcccaagacacggctgtggtatcgaaattggattccgtgtaagccaatgaagcaagcatacgccaatcccaaccgatatctttggagtacttcttgaataaatcatcatagtgcgatatcttcccctctcttagtgaaaggataggagaatggggcatcattttgctattctcgaagtagcgtttcatactggctgtataggcaggagaggtcatattttcttcatgccatttggtggctgctgccgccagctcgggacagtcttttctcacagcccatgatgaacgttggtcaaaactgatagacaagccaatatttaagttgggataatacgttttattaagcttggccaaatcgttgtcggctaccgtgtatggaatcttgccttgtgctacttgtgtgatcaggtcttcggtagtgatactgtcattggttaccttctggatttgaatgcctcctcccaattcgttgttcaggttgacaagacggtcgtaatactttccgggctttacatagatatctttccctatcagttccgttacatctttcaagggtttttgttttccttttccctgttgcacaataacctgatgggtgatgatatcctcaccgcaatagataaggctgtctttccattcctttgttacaggtagattgtaggcaatcatgtctccttcgcctgccagtaatttccggatcagttcatcgacactgttagctacttcgattctaagttttaatcccaaacttttggcaaactgaccgctaagttcatattgaaatcccatttcctgtccccgataaatgaagtaggaagtagaactgtatagtgtcaatacaaccagttcgccgctgtcttttatctgcggaaggtcgtatgcgttctcgcttacaggattgggtcgcgtgttcttacatccgaacacgcaacagaataatacaaggaataaaggaataatcagtgtcctaacgcccattctttaattttcaatttttaattcttgaggtgcttcttgatatacattgtcagaatatcaatagctaccttattgtttccaccttccggtacaataagatcggcataacgcttgcaaggttcgatgaattgtagatgcattggtttcagaacccgcgtataacgttccatgaccgcttcggcagtacgtccgcgttcaatcacgtctctttggataacacgtatcagtcgttcgtcaggatcagcgtctacaaatattttaaggtccatcatgttgcgcaattttttatcacataaagcaaggattccctcaatgataaccacttcgcgaggttcgatgtgaatcgtttcgggctgccgtgtacatgtaagataagaataggtaggctgttcaatgcttttcccttctttcaacagcatgatatgcttagatagcaaactccattcgaaagcgtccggatggtcgaaattgatattctgacgttcttccaccgggacgtggctgctgtctttgtagtatgagtcctgaggtagtaacaccacttctcctgtggggagactttctatgattttccgtacaacggtggtctttccggaacctgttccgcctgctatgcctattattaacatctctttaagtatatatttaaactaaatggagtaaatttgcattgtttatacagtatatagaagacaaatatagaaacaattcattaaaatagcaacggtaatggtaaaacacattgtattatttaagttaaaagacgatgttcccgctgaagagaagctggcagtcatgactaaatttaaggaagcgatagaagcacttcccgctaaaatctctgtaatccgtaaggtagaggtcggattgaatataaatccgggtgagacttggaacatcgcgctttacagtgagtttgatactttagaagatgtgagatactatgcaacgcatccggaacatgttgcggccggtaagattctggctgaaacaaaggaaagccgtgcgtgcgtggattatgagttataacccccaataataaaagaatgaaaaaactattttcttttctgcttttaaactttgtggtctatgtgttgcaagcgcagatacaggatcctgtgaaatttaaaacggagttgaaatctctttccgatacggaagcggagattgtatttactgcaaccattgacaaggggtggcatgtatattctactgagcttggggacggaggacctatttccgccacattcaacgtcgatagcaaatcggggattgaaccggtaggaaagttgaaaccggtaggtaaggagatagctactttcgacaagttgttcgagatgaaagtacgctatttcgagaacacggctaagtttatccaaaaggtgaagttcacaggaggggcttatgcgatagatgggtatctggaatatggagcttgtaatgatgaaagttgcctgcctccgacacaggttccgttcaagtttgccggagaagctgagggtaatacggtggcggctaaagaggacaaatcggttaaagaggataaagcagacaagacagagacagatttagctgtttcaaaagatacggttgccatgaccgaactgcttcccgctactccggtggatgcgtctacaggtatccagcctgctgttgcatccagtgagctttggaagccggtcattagtgaactgcaagcgctgggagaggagcatggacagaaagatatgtcttggatatatatattcataacaggttttctaggtggattattggcattgtttactccttgtgtatggccgattattccgatgaccgtcagtttctttctgaaacgcagcaaggataagaagaaaggtattcgtgacgcatggacgtacggtgcgtctatcgtagtgatttatgttgcgttggggttggctattacactgattttcggtgccagtgcgctgaatgctttgtctaccaatgctatctttaatattctcttcttcttgatgttggtggtttttgcagcttcattctttggagctttcgagatcaggctcccgtcgaagtggggaaatgcggtagatagtaaggctgaatcaacgaccggtctgttgagtatcttcctgatggctttcactctatctttggtgtctttctcttgcacaggtccgattatcggatttttgctcgtacaggtgtctacaacgggaagtgtggttgctccggcaattggtatgttaggatttgccattgcattggctctgccgtttactctgttcgctctgttcccgtcatggctgaaatctatgccgaagtctggtggatggatgaatgtgataaaggtgacgttgggctttcttgaattggcattcgcacttaagttcttgtcggtagccgatttggcatacggatggagactgctcgaccgtgaaacgttccttgctttgtggatcgtgatttttgctttgcttggattctatttgttgggtaaggttaaattcccgcacgacgatgatgataataaggtaggagttacccgtttttttatggcgcttatttctttggcgtttgcggtatatatggttcccggtttgtggggagcaccgttgaaggcggtaagtgcattcgctccgcctatgcatacgcaggattttaacttgtatgagaatgaggtgcatccaaaattcaaggattacgagctgggaatagagtatgcccgccagcaaggtaagccggttatgattgactttaccggacatggttgtgtgaattgccgtaagatggaagctgccgtatggacagattcaaaggtgagtgatattattaataaggattatgtgctcatctctttatatgtagatgataaaactccgctttcggaaccggtgaaagtagtagaaaatggtacagaacgtacattgcgtactgtaggcgacaaatggagttatctgcaacgtgtgaaattcggtgccaacgcccagcctttctatgtattgctggatggtcagggaaaaccgttgaacaagtcgtatgcttatgatgaagatataactaaatatattgacttcctgcaagtaggactggaaaattataggaaggagaagtaatgacttctcttgcgatggattaataaaaggcgacttcatccaagaatgaagccgccttttatttttttatttcgtctctatcagccaacgattgatattgtgtaaattccacacctatcttcatactttccgatggcctttctgataaggaatcagatatcctttttcgtcaatctgtttcaacattttttcgcagttccatttaatttgaaatcaaacacagaggtttggatacaagagaagataacttgataatgactttcggtctggtcattcaattcgtatggaatataggcaaagaaagcttcaagacgggtgaggaaagattcataatcacctgtgcgtaattcttgaacgaatttgccgatataaaatccttgatcgcacgttctttttttaagatataatatgcaaatgagaatttaggcagaagacgaatataatcttttcagtatcttttcagtatcatgttttttctttgcgtagaataaattactatctttgccactttaacccgataatcaatgagtagaatattattaaatacaaaaatttggctattaatgctattgttgggtgtcgtttcttctgtttatgcacaagatgatgatttcacaacttggacaaaatttaaaataaatcataaaattgattcccagttttctgtttccggtgatgtggagctacgtacaaaggacgatctgaacaagtgggatcgttggggacttactgtcggaggcgactatcgggcatattcctttttgaaattgggagttgcttatgagactcatctgcgtgatttaggggattcgggctggaaattcaggcatcgctatcatttaagtgctacggtaagttttcgctatcagtggttgaaagtttccttacgggaaagattccaacaaactttcgatagtggtgatgcagaaactcgtttgcgctctcgtttgaagttatcttatgcacctacaaaaggaattgtttccccttacttttctgttgaactttaccaaagtctggatgatgcacctttttggagagcggctcgcatgcgttatcgtccgggagtagaactaaatttggctaaacgctggtcgttggatgttttttattgttatcagtatgaaccttcaaaaggaaaacatattgccggaatagaagtaggctattctttttaaaattgctagttctactatcgtaaactagtgaatttctaatataataatgtgggaatgaatttctatgattttaatagctgatttataacagattgattattggtgtattacatataaatgtgaaaaaatactagtaaaataatacttcacgtcctttttattatatatatttgccgccaatacatcaaaatggtgtgttgaaattgatgattcctcagtgcaacagacgtgttgttcagtatctcataactgaaagcgaatacttcctcttatgctattcttctgtccaatcaaagatttctatttggaaataaataaagatattaagatgaaagtattttataacctgcagagatgtgtaggttttctcgttcttttctctattttgcttgcagcttgtgtaaatcacatttcggaggaggaagaagcaggtgtggtagttaatgatggaaatattccattgaaaattatagctgatattcatgaagttgccaatacgcgtgtggcaaataacacctttgagaaaggagatgaagtgggactgttcgcattagccggttctactaccatacaggaagaacgttatgcggacaatcttcattttgttcgttcggccgatggagagtttatagctgatgaatcggtgtattatccggatgatggtgtgacgctgaatttaatcagttattatccatatcgggaagaaggagtagctatgggagaaagcaagatgccggtatctattgaaacagagcaaaatattccggcgaactattctcattctgattttctggttgctactaaagaagatgtactggcgactcaagaggctatagccttgacttacaatcataaatttttccgcttaaagatagctttagtatctggagagggagaagacgtggaaagtatgttgacggccaatcctaaactttctgtttccggcttttacacaaaaagcatttatgactttcagaagaaatcttattcctcctttacagatgagaaagatatcattcctaccggtgagtgggagatagtcgatgaaaggctagtaggtaaagacctgattttgatacctcaggaagcgacagtaggataccaatatataacattggaggctaacggaaaaccatacacttgcttgttgccctctactttgaaacttcaggaaggcaaacaaagagaactggaaataacttttgtagcagcagaagatatcctcatgagcaagctcaatggagaaatcaatgattgggagggaactgaagtagatcatacaggatcagagactcttcataaatatatagatgtgtcaaagttaactttcgagaactcaaacatttgtaaagtgctgaataaaggaaaacaaatggctgagatttgtaaggagtatctggtaactccggatttttcttcgcaagcaatcgtagtctatccgatgaaagaagatggaacggctgatttatctcgagggcttgtagcacaattgttagggaaaaccggcaaagtgcatggcggaaatgtcgtatgggatacggaaaaccactccttgaattatacaccgggaactttaccggctcgaaataatatttatgtgatggcgaatggggaagtctctttatcggtagctatgggggatgatgtattacaagtcttggcattggaggatgttgctcgtgatgtacgtggagggatgatccataattatccgttggtgaaaatcggaacccaatattggatgcgtgacaatttgaaagcctctttctatatagatggtaatgaaatccctaaattggatgcagtgacagatggtgcagtcggatacctacaatccgaagcgaatgcaacatattatttctatactgctagtgtcgcattatccggtaatattctgccgaatcattggagtgttccgacttgggaggattggaatatactaaaaacttacttgaaagaagatgcttccttattaaagtccggtacatggttacccttgaacaccggagatacagcagagcctgcgactaattggtctggttttgatggaattcctgtgggaatgtatgtgggaacttttcagttaaactatgaaggtaagtatttagcatactggactttggatgaaacaaattcagagatagccgaaactgtattttatctgaaaagtgatacgaacctgatagaatcttctaaagcaggtactgataaaaaagcgctggctatccgttgtattcgcaagtaaataaatgaaattcatccttctttttcatattttgattatatttgggaagtgaaactaataaaagagaaccatgaagaagataataaatccctggaaagggttggagggatacaattgtttcggttgtgctcccaataatgaagctggagtaagaatggaattttacgaggacagcgaggaaatcgtaagtatctggaaacctcgtccggagtatcaaggttggattgatacattgcatggtggtattcaggccgttttgctggatgaaatttgtgcttgggtcgtactccgtaaattgcaaacaacaggagtaacttcaaaaatggagacgcgttaccggaagtcaattgatacgaaagactcccatgtcgtgttgcgtgcatccatcaaagaaataaagcggaacattgttatcattgaagcgaagctatataataaggatggcgaagtatgtacggaagctgtttgtacctatttcacattcccgcaggaaaaagcgagaaaagagatgcattttcttcaatgtgatgtagaaccggaagaaatattacctttaatttgaaatgaaaactcgtttttttgtgataaatgtttggtagtatcaaacaaattctttacttttgtcgcagttaataaaagaaatatgaaatatacagctatacatcatcatcattttcctaacgaataactcggtgggcatggatgatattgtatatgtctttatataacgataacgaaggcttgccgaatacggtaagccttttttattttactcaaaacgaattgtaattaataaaataataattgataaagtcatgttaagaatcgcagtacaagccaaaggacgtctttttgaagagacaatggcacttttagaagagtcggatatcaagttgagcacaacgaaacgtaccttattggtgcaatcttccaattttcctattgaggtacttttcctccgtgatgacgatatcccgcaaacagtggctacgggtgtagctgatttgggaattgtcggcgagaacgagtttatggaaaaagaagaagatgctgaaatcattaaacgtctgggattcagcaagtgccgtttgtcattggccatgccgaaagatattgaatatccgggattatcatggttcgaaggaaagaagattgccacctcttatccggtaatccttcgcaactttttgaaaaagagtggggtgaatgctgagattcacgtgattaccggttcggttgaagtatctccgggtattggattggccgatgcaatttttgatattgtaagttcaggttctactttggttagcaaccgactgaaagaagtggaagttgtgatgaagtcagaagccttgttgattggcaataaaaacatgagcgacgagaaaaaagcagtactcaaagaacttctgttccgtatgaacgctgtgaaaacagctgaagacaagaaatacgtgttgatgaatgcccccaaagataaattggaagaaattattgccgtattacccggtatgaaaagtcctaccgtaatgccgttggcacaagaaggttggtgctctgtgcatacggtacttgatgaaaaacgtttctgggaaattatcggaaagttgaaaggactgggagctgaaggtatcttggtgttaccgattgaaaagatgattttgtaatatatcgagataaaccgtataatgtgattgaaataaataatctgtgtaaatcagtgtaatctgtggtgaaccatgaaattgattaaatatccctcaaaggagcagtgggcggaacttctgaaacgtccggcgctcaataccgagagcctttttgataccgtccgttctattatagataaggtaaaggcagaaggtgataaagccgtgttggagtatgaagccgcttttgataaagttaccttgtctgcccttgctgtaagtccgaaagagatacaggcagccggagcattggtaagtgatgacttgaaagtggccatctctttagctaaacaaaatattgaaacattccattcttcccaacgttttgtcggcaagaaggtagaaacaatgaagggagtaacttgttggcaaaagtcagtaggtattgagaaggtaggtctttatattccaggaggaacggcacctcttttctcaacagtcctaatgcttgccgttcccgctaaaatagcaggatgcaaggagattgtactttgtacgcctccggataagaatggaaatattcatcccgccatcctttttgcagcccaactggcaggagtcagcaaaatattcaaggtgggaggcgtacaggccatcgccgctatggcgtacggaacggaaagcgtgcctaaggtttataaaattttcggtcccggcaatcaatatgtgacagctgccaaacaattggtgagtctgcgtgatgtagcgattgatatgcccgcaggtccttccgaagtggaggtattggctgatgtatcggccaatccgacttttgttgcagctgacttattgtcgcaggcggaacatggagtggatagtcagtctatgctgatcacaacatccgagcaacttcagacggaagtaatggcggaagtagaacgccagttggcaaaacttccccgtcgtgagatagcagccaaatcattggaaaacagtaagcttgttttggtgaaagaccttgatgaagcattagagttgaccaatgcttatgcaccggaacatttgatcattgaaacggaaaactatatggaagtggctgagcgggtgacgaatgccggttctgtattcttgggttccttaactcctgaaagtgccggtgactatgcttccggaacaaatcacaccctgccgaccaacggttatgccaaagcctatagcggtgtaagtctggatagttttatccgcaagattaccttccaggaaattcttccggaaggaataaaaaacataggtcctgctattgaagagatggcggctaatgaacagctggatgcacataaaaatgcggttactgtccgtctgaaaaccctaatttaataatgaatatgaaacgcttacaagaactaacccggccgaatatttggaaactgaaaccctattcttcggctcgtgatgaatataaaggagttacggcttctgtctttctggatgctaacgagaatccgtacaatacgccccacaaccgctatccagatccgatgcagtgtgaattgaaagcaatgttgtcgaagataaagaaagtatcccccgagcatatttttcttggaaacggtagcgatgaggccatcgacttggtttttcgtgcattctgcgaaccgggtaaagataatgtagtggctatcgatcctacttatggaatgtatcaagtgtgtgccgatgtgaatgatgtcgaataccggaaagtattgctggataataactttcagttttctgctgataagttattgacggctaccgatgaacacaccaaacttatttttctttgttcacccaacaacccgacaggaaatgacttactccgttctgagatagaaaaaatactgaaccgatttgaaggattggtaatgttggatgaggcctacaatgatttctctgaagctccttcttttctcgaagagctggataaatatcctaaccttgtggtattccaaacattctccaaagcgtggggatgcgctgctattcgtttaggaatggcttttgcttctaaagagattatcgatatcctcagtaaaataaaatacccttataacgtcaatcaacttacccagcaacaagccatctccatgttgcacaaatactatgagatagaacgttgggtgaagacgttgaaggaagagcgtgattatttggaagcggaatttgagaaacttccttgtaccattcaactctttccgtccgatgccaatttctttttggttaaggtgacggatgctgtgaaaatctataattatctagtaggtgaaggtatcattgtgcgcaatcgtcacaccgtttcactgtgttgcaactgtctgcgtgttaccgttggtacccgtgtggaaaatgacactctgttggctgctcttaaaaaataccaggaataaattatgaaaaagaaagtattatttatagacagagacggaacgttggttatcgaaccgcccatcgactatcagctcgactcattggagaagttggagttctatccgaaagtattccgcaacttaggctttattcgtagtaaactcgatttcgaatttgtaatggtcaccaatcaggatggactgggtacttcttcttttccggaggaaaccttctggcctgctcacaatctgatgttaaaaacgttggagggtgagggaattacttttgacgagattctgattgaccgaagttttccagaagataatgctcctacccgtaaaccgcgtaccggtatgttgaccaaatatctggatagcccggaatatgatcttaccgggagttttgttatcggtgatcgtcctacggatgtggaacttgcccaaaatttagggtgtcgtgccatttatttgcaggattctacagaaagtctcaaagaaaaagggttggaagaagtctgtgcccttgcaactacggattgggatcggatagccgagtacttgtttgccggtgagcggaaagcggaagtacagcgcaccaccaaagagacagatatctatatagctttaaatcttgatggaaatggaatgtgtgatatctctaccggtcttggctttttcgatcatatgctagaacagattggaagacattccggcatggatttgacaattcgtgtgaaaggagatctggaagtggatgaacatcataccatcgaagatactgctattgcattaggagaatgtatttaccaggctttaggtagtaagcgtggaattgaacgttatggctatgctttaccgatggatgattgtctttgtcaggtttgtctggactttggcggacgtccttggctggtgtggaatgtggagtttaaacgcgagaaaataggagaaatgcctacagaaatgttccttcatttcttcaagtcattgagcgacgctgcaaagatgaatctgaatatcaaagcggaaggacagaatgagcaccataagatagaaggaatctttaaagcccttgcacgtgctttgaagatggcgattaagagagatatttatcatttcgaacttccatctagtaagggggtgctttgactgttgcatgattgggtaaagcattatatttgagattaatatgttgtaacatagtgtatttatatagtactgtgacatttttgtttctccctctataatacttagaataaatacaaaaatgtcacagacaaaatgcctgccaaaatgaaatttttgtcaggaggaattataagttttctatttctttaagccacatggcgaaactcgcatcactcggcattctccagtctcctctcgggctgatggagatgcttcccactttaggaccgtccggcaggcatgaacgtttgaactgctgattgaagaaacggcggaagaaagtggatagccatttcttgattgtctcttcatcatacacccctccgaatgcgatatttgctagataataaatctttgacgggcggaaaccgaaacgcaggaaataatagaggaagaaatcatgcagttcataaggacctaccagatcttccgttttctgtttgatatccccgttttcatctgccggaatcagctctgggctgataggagtatctactatgtcgagcagggtagctttggattcctcatccacgccatttttcgccacccactgtaccagatatttcacgagcgttttgggtacaccggcattgacaccatacatggacatgtggtcaccattgtaggttgcccatcctaaagctagttccgacaggtctcccgtacctacaaccatcccccaggtctggttggcgatatccattaatatttgtgtacgttcgcgtgcctgtgagttttcatatgtgacatcatgtacgtttacatcatggtctatatctttgaaatgttggatgcaggcatccttgatactgatttcgcggatggatatgcccaatgaattcatcagattgacagcattgtggtaagtccggtcagttgttccgaagccgggcatggtaataccgagaatcccctttcttgaccatcccagtttatcgaaagtcttcacgcagaccaataaggctagtgttgaatccagtccgccggaaataccgactacggcagtctttgctccggtatggacgagacgttgtgtcagtcctgctacttggatggaaaaaacttcttcacaatgttcatgcagttcattgtcttgcggcacgaaaggatgagcattgaatttacgggttaaattcagctctttactgtttacaaactccgttgcaatggcaatcgcccttttgccttccaagttagcttggctggcagcgaaagtcgtattcactctccgttccgcccggatacgttccacgtcaatttcgcttacaaccaattgttcctccatgctgaaacgctcgctttgtgcaagaagcgttccgttttcataaatcaatccgttgcctgcgaaaaccacatctgtagtagattctccgaagccgcaggatgagaatacatatccggcgatacaacgtgcggattgctggctgataagtgaacggagataactatgttttccgattccttcattgtcggcggacatattgaatatgatctccgccccttgcagtgcgagggaggagccgggtgggatggtggcccagaggtcttcgcaaatttcaatgccaaatgtggtgtccgaagtttcgaaaaggagattggcgccaatcgggacaacttgtccacacaggcgtaccgtctcagttcttaattgaagtgcggaagtaaaccagcgctgttcgtagaactctttgtaattgggcaggtatgttttggcggtgacacctaatattttccctttttggatggttacggctgcattgattaccgttgaattgacgataacgggcatgccgacaatggatatgatatccagttggcgggtattgttcaatatctgcattaaccccatttcggcttcttcaagcagaagttgctggctgaacagatcaccgcaagtatatcccgtaatgctcatttccgggaacaggatgatttgcaccccttttccttcggctacagcaatcagactttctatcttctccacattgaatttacagtcggccacttttacgtgcggtacggctgctgctacttttacaaatccgtaattcatcttataccttatttatatataatgggtgcaaaaatagaaaatagttttgaataattgtcgtttctctagtgaatccttaaaaggacggtctttggacggtttatgatactgttggttgcataatcggacggtatgtcaaaaagatagtttatctgtcttttaatataaattatgtttagtcttatttaatgatataactgatttttagcaatataagctgtcaaaaagatatttgtggaattttggtataaaatatgcgacattttgtttcttatatttaactataatatttatatttgtagccaaatttaagcaatatagatgcttgtaacactaaacaaacgagcgatattacttggtagagaaaataaattaagggtagatgaacatacaacagactcacacggtggcaacacgaaaatcttttttagaaatttggcgcaacatcaaaaatcagccaagttagcttctctgttttgttttgataaatcaataaaaataaatcaatttcattaattttaatttaagtatcaaagatgagaaaatcaattctcttgtttgtgctcttttctctgatgaatattcctctgttgctgtttgcacagggagggtatcgggtaacgggacgcattctttcggctgaagacaatcagcctttgattggcgtgtctgtattggagaagggtacatcaaatggtgtaattacagatattgatggtaattacagtatcacagtgacgaaatctcccgccactctgcaattttcttatatcgggatgagacccgtagacaggcaggtcactgcttctactcgtattgacttgtcgatggaaagtgatgcacagcaggtggacgaagtggtggtggtagcttacggtgtacgtaagaaaggtaccatagccggttctgtatccaccgtgaaagcggaaaagatggaaaatgtgcctgccgccagttttgaccaggcattgcaggggcaggcaccgggattaatggtgatgtcaggctccggtgaaccgagtgtggccgcttcatttcagattcggggtatcaactctttgagttcgggaacttcgccgttgtttatccttgacggggtgccggtgtctagtgctgatttcaatacactgaaccctagtgatatcgaatcaatatccgtattgaaagatgcctcctcaacttccatctacggagcacgtgcggcaaacggtgtagtggtgattacaacgaaacgcggtctggccctagagaaggcgaaagtgacgttccgcacccagctgggtatttcccaactggctcaggacaagtggaatcagatgaatacggaagaacgtattctttttgagaaggaagtaggattggataaaggaaaagattatgatattctgcgcaaaacggatatcaactggctggacgtggtgttcaataacaaagctatgttgcagaattatgaagtgtccgtcaatcgtgctaccgaccgtttgaattattatgtgtcaggcaactttttcgaccaggacggaattgcgcagggatcaggattcagacgttacaatatgcgtgcaaatgcggatgtgaaagctagtaactggctcaaagtaggtactacttccactgtttcttatgaagagatagaacaggcacaaacaggagcgtatacttccgtaactcctatttccgcttcacacttcatgatgccttattggaacccttacaaggaagacggttcggttgcttcaaccaaagacggcagctggacgggaaccaatcagaatccggtagactggatgcagaataatcccgttagctataagaagtataaagtactgtccactctgtatgccgaagtgagccccgttagagggctgaccataaagtcacagtttgcagcggattatgcgcacatgacagcgttcagccagtcattccccagtttttccaccaacaacaattcgggtactgcgggccgtagttcgaatgacaggcttagtctgacaattacaaataccgccaactaccattttacgctgaaggaaaaacatgatttcaatttcttattaggacaggaaggggtcgatgcccagtcagaagggttctccatttctatgagagggcagaataatgaccttcttactaatatttcgaacggtacgctggctgcttcttggtcggatacggcggcaggaaccgtttattcctattcgtacctctctttcttcggaagaggcgagtataattacgacagtcgttattatgcggatttttcagtacgtaccgatgcttcttcccgttttggtaaggataacagatggggagctttctggtctgtgggattgatgtgggacatgaagaaagaaaactttctgaaaaagtatgactggctcacaactatgcgtctggctctcagtacgggtacttccggtaactcggacatcggctattatgcatggcagtctttagtgaaaggcggaatggactatatgggcgaaaccggtatttaccccgcgcaaagtggtaactccaatttgagttgggagaaaacatggaccactaacttggctttacatctgggtttctggaaccgggtaaacttggatgtcgagttatataataaaaagactacggatatgttgatggacgttccgcaatcttatgcagtgaatggctcaggaagccgttgggacaatatcggtgcaatggtcaaccgcggtgtggaagtcacagtgaatggtgatgtgctccgtacgaaagatttttcatggaatctgaacgccaacttttcgtataataagaataaaattaccgaactttacaatggagtagatgaatacgaaattgcaagtgccaatcttaaatatgtggtagggcattcggctactgaattttatattaaccgctatgccggagtcaatcctactaatggcgatgcgttgtggtataccaaagatggtgagataacgacagaattcagagattccgataaagtgatgaccggcaagagttttgtggctccgtggcaaggcggattcggcacaacattaacatggaagggcatctcgctagctgcacagttcagttgggtggccgaccgttgggtgttcaataatgaccgttatctggatgaaggcaatgggctgttcgaaacatataaccagtccagccggttgctttacgaccgttggaagaagccgggcgatgtgacggatataccgcgttatggagttactccgcaaatggattcccgttttttggaagatgcttctttcttgagattaaagaatttgatgcttagctacaacttccctcaaacattgctcaagaagactaatttcctgacgcatctgcgggtgtttgcgcaaggacaaaacctgctcacattcaccaaattctcagggcttgatcctgaaggcgtaagcaatatgtatcaggcacaatatccttcaacccgccagttcacttttggcctggaagtttcattctaaacatataactataaaacaatgaagaataagataaagatttatttgttgttgatagctttgggcattggctccgtatcatgtctggataagtatcccgatgatgctatccaggccggtcaggctatcaagacagtggacgatgccaatcaagcaattattggcatctatgcggcattcaaggatgcttcgctctatagcggacgtctgacgttgctgcccgatttgcagaccgatctggtgtatgcggtcaccggatattctaatcaatatggtgatttgtggcgttggaacatattggctaccaatgaagatattgaggcagtgtatggagctttgtattccgttatcaatcgttgtaattttctgttagattacattccgggcgtacaacaaagcacgatagacgatgatgcgctcgacaaattggatatgattcacggcgaagccctttttgcacgggcgttgtgttattctgaattgattaagctgttctgtaaatcatacgaaagtgatgcggaagccgaaaacgaattgggagtcgtactcacttctcattatgattcggtagacaatacccgccgtgcttctttaaaggactcttaccaatttatattggatgatcttgaactggctgcggaatatttgaaaatagatgaaaacagtgtgacaaaggatgacctttacagcactccatatattaatgaatatacggtttatgctctccgcgcccgtgttgctttatatatgaagcattatactgaagccatcaaatattcgaccaaagtcattgacagcggatactatgtgctttcaagtgcatctatacaatatggaagtaccggacagagcttctatcagtatatgtggacgaatgatgcttccaccgaaatcatttggaaagttggttttacgcccacttcctatgggggagctttaggcactattttcttcaattatgactattcaacggtgcgtcccgactatgtgcctgcaaaatgggcgctggatttgtatgatgcgtatgatctacgttattcgattttcttccaatcttatttaaccggctatccgcatgcactgcaatggccgttgcttcagaaatattggggaaataccgctttcatggaaagctataacattcgccacgtctccatgccgaaaccgttccgattgtcggagcagtacctcattcgtgcggaagcatactgctttaaagatacgcccgactacggaagtgcaggcaaggatctcggaaccttgcgtgccgcacgttattcttcgtatagtggcggtgtgagtgtttctgacagaaatgctttggaggtgattgaagaagaacgggtgaaagaactttatatggaaggcttccgtcttcacgacttgaagcgttggcacaaaggatttgaaagaaagccgcaaagcgaatcactgggtaacggcagcagcttgaaagtagagaaagacgatccgctctttgtatggccgattcctcaaaatgagctggacgcgccgggatcagacatccaaccgaatgaaagcaataaataaatagtttttaaaaccaataaacatgaaaaagatttttatcggactatcagtcatattcgcttttgcgcttggattctgtggctgcaacaccgattatgttaagtatagcggtcccgattatatcatgttctccgatacattgaccgtacttccggtacaaaataacgaggagtattttgatataccggtagcggccactgaggcttgcagctatgaccgcacattgggagtggagattttggataaaaagacgaatgcggtggaaggacggcatttttcccttgaatcaaacacggtgactatcaaggcgggtgagcgcatggcgaatgtccgtatacgtggtatttatgataatatagagattactgattcacttggaatggttcttcaactggtcagtaaagaagaatcgaagtgggaactttacggaacagaaacgaaagtgattttgcaaaaagtatgtccgtttgacattcatttgttcgaaggttatgctttgatcgtaacttccacctatttcagctcatatatgcagggagtaagccaacggttgattcgtaccgtagccgatccggatgcggaaaacactatcatcatgaaagactacttctataaaggatatgacctcaaagtgaagtttactaccgacgacctgctcaatccgctgattgaaatggaagaccaaccgtttgcttctaccacggatgctttcgataccatctatggcgattgggaagtgtgggcatatcaatcggggtattacacctcttattatagtagttgcgaaagattccttttgcagtacatgacattacacgtgccgggtatgccagctggaaaagatgaggtgggtacttacatcaatgtagtaaaatgggtcagtgatgacgaagcgcagattcttattgaagaaggcgtcaataattcattaaaataataataaaaaagagaaatatgagaaagcttaaacaaaaaaacttggttgcgcttatgcggaagttcagcttgggaggctgctttgcggctctgttcatggcgttatgcattagtgcttgttcggatgatgatgatacgacaaaagcggttttccctgaaaagcaaactgtcaattgtgtgtatggtgatacaaaagaactgaattttgaagcaagcgctaactggcagttgacttcttcggctacatggtgccgttttgtaaatgatggctatgaagattattctttgtcgggaaccgccggaaagcagacagtgacattgaagattaccgatgaagcagtagcgtttgatgcacctaccgttgcccgtctcactatgacgataggagcggagaaggcaattattgccgatgtggtgcgcgataataaaatgcgtgaattgaagatctacgatatggaaggtaacgaaattcatgagatagaagttggatatgataattataagcctttccaagtaaaggctaactttcgttttgccgcaactaaccggccggaatggttggagatagctggaaatgcgattgtaggtactgtaaatgaaatgacaaaaggggaagttaaggtgatggataatcctcaatatgcaaaatatgtgcaaaatggtacactaacttttgctgacgaagatggggctatgtcttatccgttccctttagtgtataaaggaatggatccgaaaagtatcaaaatacttgattccaatccttggaattgggaagtgtcgctggatggcaaaacgtttacacaaacaagtagtgcaggagccagtgcttctactacaatctctacttataataaatttgtaccttataccgtgcaagctttgaatgatgaagtggttccagtgtatattcagaaagtagaagagtatggaacggtgaagatgaaaataggagaagaagatggagtggactggatgagacttgaagatgagggacaaggtaatttgcggttgaaagtggatcaatcttccgaagaaagagaaggatatgtgttggtattgcctaaagcgttatatgaagaaattaaggatgaattatgggaaaatttgatagaaatggatatggaaacaaacgaacaggatatcaaatatacttatcaacaaagtaatctattgatcaattttgtgcagaaagagaaaaagcaggaggcggcacaggcatttaaagtgacttacacaggtgaaggttggactactttagaagctacttgcacaaaagtcactgatgctgatatattggagtcatatccaggtgtaagtgatgtttatacaatggaatggccggcaaatatcatgatgggtggtatcactgttgatccattagagggtcaggtatacgatgattggagttttgtattaatgtataataatactgatctatcttctgatcctgaatctgttgaaggttctggaactgggatatctatatttgcaactcctagtggtgcggaacatcatcttcaaattaaaaaagacgatgtgacaataaaagtactaattattaccccgaattataattaatcattgaataaatgaataagaaactatattccatattattctttgttccccttattgtctgtttattggcaatgacggtggtaacaggatgctctgatgatgacgaaccgttgcagtccacttatggatatgtgcagttcagattattaaagagtgcatccatggacaaaggaacgacaacgcgtgctgtgaccgataagctggataagctgaacgatgcacagaaagtgaaagttgtcatgcaatacaatggttcaactattactcagactttgctattgaatgcatacaatgcggaaaatgcagaattcggactccgtagtgataagttgaagttgcttacaggaacctatactgttattggttactacttgtatgataagttggacaatgtattatatgcaggaccagccggggagaataatgcctttgcgattgtttccgacggtctgcatacacagaatttgagtgtagatgcggtggcacggggcatggtcacattcaaattggtgaaagactttgtgaagacccgtgcaacgggggaggaagcttatccgttgagcaatatcctggcaatagatattactgtgaaaaaccttttcactcaggaattgactacgataaaaagcattcgggtgaaatatgtagaagactttaccgataaacctgcagaagactatgtcgatgctgatagaaaccaggagacttcctatatggaatgtgatacggtggcatggctgaaagccggtacttatcagataagtagttatacaacctattcggataaaaaggctaagaacatattggaagtagccaccgtgcagacatccaaatcgtttgtcgtgaaagacaatgaagtgacaaaggatgctgaagtccctgtccgtcttgacgaaacagccgaatacatcaaagactatatagcactgaaagctatctggacaaagatggatggtcagaactggaagtattacggagaatcctcaccgatgggagccaattggaatttcaataaggacattgacttgtggggaaatcagcccggcgtgcagttgttggataacgggcgtgtagctcttttatctcttgccggattcggtgctaaaggagtggtacccgatgaaatcggtcaacttaccgaattaagaatcttatcattgggaacacatgatgaaaagctgggaggacacttgttcgataactattccgtcaacatgagcgaagaacagcggaaagcaatgagaatggactatgatacgaaattcctttcaaaagacgcccgggaggatttgtccggtattctacgcaaaggaatcaacgacaatccgaagatgaagcccatcaagagcagccgcatttctacgaaagatgtgcagtttggtgttttgacgaacggaatcaccggtgtatccaaagccatcatgaggctgacaaaactggaacaattctttatagccaactcacctatccgcagtgacggtttctttgttgaggtaaagcctgattctccttattatgaagaacaggatgagtggaaatgggaggatatgaccaccttgacggatatagaaatttacaactgtcctaatttggaaacgctgccagtggatatgttgaagaacttacctgaattggtctcactcaatgtggcgcgtaatccgggtatttacgctgaagatagagatgtgttgaaagagaactgggaagagattatcggagacgattcaaaatgtgcggataaaatccagttgttatatttaggatataataaattgaaagaatttcctgaatatgaccttttgaaaaagatgaaaaaattgtcattgctggattgtaccaacaatgagattgaaacattgcatccttttggtaaggaagtcaaactgatgaaagtatatctggataataataaaataacagagattccgagtgttgaggaaaacggattgaaatatttctttgggtggaatgatgtggagaattttagctgttcaaataatctgctgaccgaagtgccgaatattttcaatgccaagtctgattttgtaatgggaacagtcgatttctccaacaatctgatcgataagtttgaagatggcgaagatcaccggggtatcaatgcttctaccgtcaatctgcatcacaacaaatttaaggtattccctaaacttctgtttgagaaagaatcaccgatgcagacactgaacctttccgccaatggtatgacaactattcctaaaggggcattgaaaggaaagacatctttggagtatctcacaagtcttgacttgacctataataagttgagttcgctgacagatgatttttatgtgattaatatgccggtattgtacggattggatttgagttacaatcaattctccaaattcccgacccaaccgctgtcaatcaattatctggtggtattcggtatcagacatcaacgtgacgataacggcaaccggacattgcgggagtggcctacgggactttataagaatccgagccttaaagccttctatatcggctccaatgacttgcgtaaaattgacgataccatttcgccgattatcttgatgttcgaaatcaaggataatcccaatatttcgattgacataagcgatgtatgcccttatatcaaagccggacggtatacgttggtttacgataagtcgcaggatatccgtggttgcgatgcgcttgatctggataaataacaatatagaataaaatatcaatgaaatatttagtaaaaatagcattaggattattcgtttacatggctgctgtggcatcatgtaaagatgatgacgatagtggtattaccggattctctatagataaggaagatatcacgatgggtgctgacggtggcaaggatagggtcaacgtcttatcgggaggcgaatgggtggccagtgcgtcggaaccttgggtaaatatctctcctgccaatggttccggggttaccgagtgtacagtttctattgattcgaccttgattaatggaatgcgtaaagcggaaatccgctttatcccgcgcggacaggcaccgtgcgtaatgacagtgcatcagaccggttacggcaagatgatttatatagaaaagccagatgtggaaatcaaagcgtcggacaattatgataaacgctattttgatgtgaccgtaaccacaaacgttgcattcaaaatgaatacgaagtatgatgtcgagccgcaaaagaaatggcttaccttgcctaaggatcccactgtcgatttggaccgaggctctcgtccgcgtactactaaaatccgtgtggaatggatgatgaatccggattttgacatccgtacggcgcaaattcattttacacctcaaaatgccgatgataaactggaacagcctgccgtggtgacagtcacccagaaggcttcgccgaggattgaagataatcgttcgggtgactcattggcactgctcactatcagagaacgtctggaagtaggtaataactggaatccgggagaaaatatgaggtattgggacaatgtcgtattgtgggaagaagatgacaaggatcttccgaaaggcgaaaatgtagtgggacgcgttcgctccgttactttcaatatgattaatactaaagaatccattccgcaggaagtacattacctgacgtatctggagagcctgactttcttcggcaacacgaatacggcaactaagagcattacgttggaagcggatgtatgcagtaatttaaagtacctgaagtcattaactgttagcgcttacgggctgatagcgctttcggacgattttgtccggttgggcgaacgactcgagaagttggacttaagtagcaacaactttaattccgtaccggcagttataacgaaagagaatttcccgaaactgaagtctcttaatttgattggtaacagaagatctgttctttccgaccttagagaagcgaaagacagcagcaagtatcctgatggtataggtctgttcttcaatacgaaagatgataatacgctccgcagattatttttgtgggataatttggaagagttaagattgtcttacaattttattgaaggtacattgcccgattttaaaataggagaggaaggagtgaccggttactcacgggccgatgtggatgcatttggtggtgacaccattcaatatctggtaaatgagggcgccaatattcccaagattcttccgaagatgaaacagcttagcgtcaatctgaacttctttaccggtaatttacccgactggatgttgtatcatcctcatctgatagattgggatccggagatattgatctacaaccagatggaaaaaggattgaattcggaaggaaaaatggtaaggtttgataacgaaccgtctacattcgacgcgtattttaaagccttccctaaattcaaggaaaaatatgaactcaaagaataggatatgaagagaatatatatttatgtaataacagcgtttgcattgctggcgggagcttgtagtgacaacaacctgaacgatgacgctccggtggttcccgctactccggacatagtgataccggaaggagctgccgaaggggagttattgattaagttcgttcccgaaatgactgaaattctcgaccgcacgatgaaaacacgtgcggcgggagcctccacccggtcgggcattccctcaacggacgaggtgctctctatcttgggagcgtatgactttgaacgcgtttttccagttgattcgcgcaccgaagaaaagagccgtgaggcgggattgcatctttggtatctggtacgttttgataaaaatacggatttgaaggaagctatggaaagattgtcaggtttgggcgagatttccaaactccagataaatcctgccattcagcgtgcctataatcccaagaagaaacctgttccggtgtcggaagcagccctgaacaggatgagaacacgtgcggcagcagacaatggtttcaagttcaatgatgctttgttaccgcaccaatggggatacattaaccgtggagcgtatgactttgcaacagagaatgctcctgctattgttggctccgacgttaattgtgaggaagcatgggaactgtgtacgggtgatccggaaatcattgttgccgtgcttgatgaaggagttatgtatactcatgaagatttgacggctaatatgtgggtgaatgaaaaggaacaggttggttctgaccaggataatgacggcaatggttataagggtgaccgttatggctacaatttcgtgaaagataacgggaatatcagttggcaagctgccgaagataccggtcacggcacgcatgtggcgggaacgattgctgccgtgaatggtaataataaaggagtctgtggcattgccggaggagacggaactaaaaagggagtacggattatgtcctgccaggttttcgatggcgatggtcaggtgaggatggttaatgaggcaagagctatcaaatatgcggccgacaacggtgctgtaatccttcaatgcagttgggggtacaattccgcttattccaatccgatgcaaggatatatacctggccctgccacagacgaagaatgggcaaaaagttatcctttggaaaaagaagcgttggactactttatccataacgcgggttctcctaatggggtaattgaaggtggactggctatttttgcttccggtaatgaatattcgtatatgtcttcctatccggcagcttacgagggatgtatttcggtagcttcgatcgcagccgattacacaccgtcgtcattcagcaactatggtgcggaagtggatttctgtgctccgggcggtgacagtgaatatcattgtgttcctggagaagatactgatggtaatgatgtgagcattgcccagggaatgattctctctacgttggtagtggagggcaaacaagcctacggatataatgagggtacgtcgatggcttgtcctcatgtatcgggagtggctgcattaggcttgtcgtatgctttgcagcaacgccgccacttcaaagcacaggagtttataaatttgatgaagcagacagcgaaagaggtggattcatattacaaaggctataagacctattattatttgcataactctccgggctggtcggcaaccaaaatggaccttccttcttataggggtaaaatgggtaaactggtcgatgccggtgcgttgctgcacgctattgcgggaagcgggtcggatatgaaaataccgaatctgtatgtaggaaccggcaaaaccgtgaaaatagatctgagacgttatttcttgaatggggaagaattgacatacgaatgtactattaacgatacgtcgaaggctgttgctacttttgaaggtactgtaatgactgtaaaaggggttgttacgggcatgacaaacgccacattgaaaacaagcggcggtaaggaacaatccttcaccattactatccgcaataatgcgaatgataatggatggatgtaattgggtctgacagatagatgaacaggaaacggagatattgttggctttactggctgatagccttttctcctgcacattatatgggtgcacagggagttggctatcagtctgtagcagtcgattcgttggtcaatcctcctttactggaagagggcggacaagtattttgcttcgattctatccatatgcatatcggtaatatacctgataccgatgcaccccgggtctgcacattcccgttccgcaatatcagtggcagggaggtacggattacgaaaattagcacttcgtgcgggtgtacggcagcggcattcagttcggaaactcttgtcccgggaacggaaagtacggtgacgttggtatatgatcccaagaaccgtatcggaacagtagaaacctatgcatttgtgtatacggatgtatcggataaacatccggtagcccgtctggtgctgacgggtgaagtgatctgttctgacgagtggagctatcttcctgtcgtgatgggagtgctgcgcatgaaacgcaaacaggtcgtcttttcggaaatgacctccggcattcgtccttcagaacgtattttgtgcgccaataccggaaagaaacctttgaagctttctgcacggatgcttcccctgtatgctgcttttcatacggaaccggcagttatacagccgggacaggaagcggacgtggtaatcacggtagatggtagtaaattatctgatattccggacagcagattgcagttcaattttcttgttgaaggagttgatgcaccggtaacggatcgcttagtcaaagtaactgtcaaacgtttgtaataatatttttgattaacattttaaaaactataatatgagaattcttttcagaataataccgttatgtatgctcttgcttggctttgtggcctgtgatgatgaagatgaggcaaaggtggaaacactggaagtgactcccgccaatctgaacggtacctggcaattagtggaatggaacggagagtcccttgcagaaggtacttattgctatataacttttgtccgcagagataaaacttttcagatgtatcagaaatttgatagcatgtatgcccgttttttcagcgggacattcgaaattgaaaaagatgatgatctgggatatattgtgagtggtaagtatgattacagtttgggtggtcgttggaacaattcatatgtcgtaacagatcttttaccttcgggttctatgatttggactgtgaaagatgatatgggagatgtgtctaagtatgtacgctgtgacggagttccttctgatattgtagaagaaactgaagttgatacgggtaattaaatctgataataccggtcatgtcataaaaaaagtcatgaattatttggaaataagataaagggtttctatctttgcattagatttatagttgtaatgaatacaagtttggaaaggaagggataaatgatgaaaccatacgaacgattattagatcataatatcaaaccatcagtacaacgcattgccattatgcaatacttgatggaatatcccgtccatccatcggcggatgatatttacaccgcattgtctccatctatgcctacgctttcaaaaactacggtttataatactttgaaactgttttcggagcagggagcggcacagatgctcacaattgatgaaaaaaatactaattttgatgcggatacttctctccattctcatttcctttgcaaatgttgcggacatatttatgatttgcaatgtcccgaagcggtgaaagatgtggaaagtatggaaatggaggggcatcaggtagcggaagttcattattattataaaggtatttgcaagaattgcttaagtaaagataaagaaacacgtattgactaattaatttaaaattgagaagaaaatgaaaaaatttagatgtactgtttgcggttacgtttatgaaggtgacgcagctcctgagaaatgtcctttgtgtaaagctcctgccagcaagttcgttgaagttgttgagactgaaggcggtgcactgacttttgctgatgagcacgttatcggtgttgcaaaaggttgtgatgaagaaatgattaaggacctgaacaaccacttcatgggcgagtgtactgaagttggtatgtatttggctatgagccgtcaggctgaccgtgaaggttatcctgaagtagctgaggctttcaagcgttacgcttgggaagaagctgaacacgctgctaaatttgcagagttgctgggtgactgtgtatgggataccaaaactaacttgcagaaacgtaaagacgctgaacaaggtgcatgtgaagataaaaaacgtatcgcaacccgtgctagagctttgaacttggatgctattcacgacactgtacacgaaatgtgtaaagacgaagctcgtcacggtaaaggttttgaaggtttgtacaaccgttatttcggtgataaataatcaagcctcataataactcttaaaaggtctgtgttctcatacgaatgcagaccttttttgtttatatttgctcatcaacttttaaatgccgcaattatgagaaaagtacaactgttgttggtttgtttgatgttttctgtagtcgctttggctgctgaaaaagtaattaagttgccgaaacccaacttggaccgtacaggttcggtaatgaaagccttgtctgaacggcattctactcgggaatttgctgcaaaggctttgagcttgtcggatctttcggatttattatgggctgctaatggagttaaccgcaaagattcgggtaaacgcacagctccttctgctttgaacaaacaggatgtgaatgtgtatgttgttttatcggaaggaagttatttgtatgatgcccaaaatcatcagttgactctggttgctgaaggagattatcgtagcgcagttgcaggtggacaggcttttgtgaaatcggcgcctgtctctttggttctggtcagcgatgtttctcgtttcggagatgcaaagaatgcccgtaaccagttgatgggagctatggatgcaggaatcgtttcacagaacatttctgtcttttgttcttctgctaaattggctacagtgccacgtgcatcgatggatggcaatcagttgaaggaagtgctaaagctaaaagacggtcagattcccatgatgaatcatccggtaggatattttaaataagaaatgcggggatataaaaaagtgacgatatctttatgagataccgtcacttttgattttactttaatagaaattcatcaattgcttttttgtaggttgctttatcggcagctccacggaaaagctgtggatctcctttcatggggatgaatacgaacaaagggatacttgttgcattgaacagggctgccagttctttctgtctgtctacattcactttatagataattatcttccctgcatattcctttgccaactctttcatgataggagctgtctgccgacatggtccgcaccagtcggcataaaggtcaatgatggcaggcttgtcgcctttgtatttccacttctttgatttctcataatcgaagacgtctttcagaaacatttccttgttcattacgacgacttcaccgttatctgttacttcttttttaccttgattggtttcagctttgtcattgaaagcgtatataatcacgcttaccatgacgaaagctaccattgctaatactttcttcattcgttattttgtcttttatgtataatgtttctcaattaccccttgcagttcgctactgtggattacacctgaatgtctccagacagcttctccatctttgaacagtataaaggtcggtactgcttgtatacggtattttgtagccagctcttcatgctggtcaacgtctatctttacaatacgcgctttatcacctacattctgtttcacttcttccaaaacaggtttcatcgctttacagggtccacaccattccgcaaaaaaatctactaaaaccggcatcggcaactttattaaatcttcaaacttttccataaatctttcctttcttaaaattaactgtcagtcattgaagactgcaaatataaactctgttttatatatataacggaaaaatgccgtttttgttcacaaaatagtaattgtagagacatcctattgtaatgtgaaacaaggaattttgcgtatcgaaacggaataaaggttgaactaaataatgatagcctatgaaattcttatttattgttcaaggtgagggtaggggacacttgacacaagccatcaccctcgaagaaatgttactgcgtaacgggcacgaagtggtggaagtgctggtgggcaagagttcgtcacgtaccttaccgggatttttcaaccggagtattcatgcaccggtgaaacgttttattagtccgaactttctgcctgcagcagatagtaaacgcccgagtttgaagaaaagtgttttttataatttgcggaagataccggaatactttcgtagcatgtgctatataaatcagcggatcaaggagacgggtgcagagattgtcattaacttctacgaacctttgacgggacttacatacgcttttttccgtcctgccgtcccgtatgtatgcatcggacatcagtacttatttctgcatcgtgattttgaatttccggagaagaacttcgttcaactatggatgttacgtttctttacgcggatgacggctattagggcttcgaagaagctagctttatcttttagaactatggaacaggatgatgtacatcggatagttgtagtaccacctctgattcgtcaggaagtggcgtccatccaaccggaagaggggaattatattcatggatatatggtgaattcaggtttttccgatagtgtggagaagtttcacatttgtcatccggagataccactgaaattcttttgggataaagcggatacggaggaagtgacaaaggtggatgagacgctccgtttttatcagattgatgatatcaagtttctcaacggaatggctggttgccgggcttatgcaagtacggcagggtttgaatctatctgtgaagcgatgtatcttggaaaacctgtcttgatggtgccggcgcatatcgaacaagattgtaatgcctatgacgcgatgagggcaggtgcgggaattatcagtgattcttttgatttggaatcgttgcttcgtttcgccggaagatatactccgaaccggaactttatctcttgggtgcgtagctgtgaacggcggataatttttgaattggaagaaacaatgaatgtggtaattgatgaaatgtatatggtagaaagctttgtctgattgacgggaatgagcaaagaaaaatggataatgaagtcagatgattcaatcatcattcattatccatttattctttataactgtttaggctctttattcctcaatagtcaattcatcaatgatgtgggaagctcccgcatatttatctataataaagagtgtataacgaatgtcgacacaggctgcgcgctgtgatgacgggcggaaagcaatgtcgcccgtcaatccttcaaagttacggtcgaaagcagttcctaccagctggcctttgccgttgaagaccgggctgccggagtttcctcccgtattgtcggtgtttacaataaagcaaacgggcatttcaccattcttaccgtaacgcccataatccttggctgcgtataactccttcaatttctgaggaactacaaattcccaattgccttgatcttctttttccatcactcccttgagggttgtgtgagcgtcataaacagctccgtcgaacggttcgtaagaaagtacctgaccataggttagccgtaaagttgaatttgcgtccggataaataggaattcctttatcctttctcatatccatcataccttttacccatactttgtgggctgcattgtaattctgattcgcttccttcatggcgatagcagttttcagtatgccgtcggtaatggagtatttgaataatatcatccagtcatatcctatcttatataggcttggctttttgatgaacttctcaaagtttttgggattaccgaagatggaatgttcgaaacattcgtcgataaatgcatctatacttcctttgaagcgtgaattgatgatttcaaagatattgatccgttgttctgccggaatataattagcataggttttcaacatttcttttcccaccatccgttctacttcggggaaaggaacagatgcgaagtatttttcaccttcctttttcagtttttgagtcgcttcttttatctgccccttgtctttcgatttcaaggcagctaccaattccatagtggaaggaatacgcatgaagtcaagagctgtcaccaatgcttcattcaaggcttgttgatggtagagcgcatcacgacgatgagctacaatggaacggatttcatcgaatgctttttggtaagagtcatctcctttttcacgaccgcgtgccaggagttcttcttgttgtgcacgcttggtatctaaaaccttgagccgtaccaaaccttcgttcataccaattgcatttttccaatagttggcagatgacgcatatttgctggcataatgaatacgtacggcaggatctttaagcatttgctccataagtaccttttgacgtgctccacgtacatgttggcgcatgaaattggttgtttgcatccgttcctccacttcatcggaaatcatgtatcgccagttacgtcccggaaatcccatgacaaaggtaaaatcaccttcttgtacaccggccagactgatggtgagatgcttcttcacttttaacggtacattgtctttcgaataggctgccggttttccgttcttgtccgcataaatgcggaacagcgaaaagtcacctgtatggcgcggccacatccagttgtcggtatccgctccgaactttccaatggaagaaggaggggcaccgaccatacggatatcactgtacacggtttttatgaacatataatatttgttcccgccgtaaaaggctttgagctccagtttggtagcgggagtaacttctatgttctcagctttggcaaaacgttccgctactttactaagatagctgggggacaggtaattgattccgtcaggatccggatcttttttcaactgctcgttgacgtaatccgtcacatcaagaatccgatcgatataagtaacggtcagtcccggagtagggagctccgcatcgcggttcatcgcccaaaagccttctgtcagatagtcgtgctccacgttgctgtgttgctggatggctccgtaaccacagtggtggttagtcagcaccaatccttcggaagagataacctctcccgtgcatcctcctccgaagtgtacgactgcatctttcaaagaaagaccgttggaattgtaaacctcttcaataggaatctcaagtccaagctcgcgcatggcaacttcattctgtgttttcaagtcggtcagcatccacataccttcgtcggcgtggatactgagcgttgccaatgaaaagactgcaaataggatttgttttttcatttattctacaattgtcatttcgtttatcagatgtccgcagtttcctaatttctccaagatgaacaggacatagcggatatccagattgatgcaacgttgcaggttgttgtcaaagttgatatcaccactcagcgattcccagtttccatcgaatgcacaaccgatcagttctccgttctcattcagaaccggactgcctgaattacctccggtgatgtcattggttgaaaggaagcaaaccggcatatcaccgttcggcaaagcataacggccgtagtcctttttttctatcagctctttcaacttggcaggtacgacaaactcacgatcttccggattttccttttccagaatacccttggtagtagtgtagtagttatagtgtacaccgtctttcgggtcgtaaggtttcacgttaccgtaagtcaggcggattgtaaagttcgcatccggataagaaggaacaggtaatttcatttcacccaaaccacggatgtaggttttgtgtaataaagccaattccttgtccatatccttcaactgtcctatgagttgttcgagtaaatcatatttggactggcaatattgcaaagccaggtcgttatcaatagcttttacagtcggtttcttgataaacttctcgaagtttgcacgattggcaaaaatggaattgtcatacatgtcatcgataaatttattatagtcgcctttatatttctgttcgataagtttgtagatagacggacgttgctctgccggaatcatttccgcataaagagggaacaatgctttggccaccttacggtccacttcgtggtcatagtctttgttatgaatctcatcatatgtctctttcagagcttcgatacgtactttaaccaaagaatcgttcttttctaccaatgcttcccgagttttggacagcagggtacttccgaactcgatagctccgaagaacgtttctcttaaacaagtgtactgatagttgagaggagctgtcttagctaccaagtcatctatcttcttcactacctccgcataatcggtattgttctgctttctggcaaattcagcgaatttggcttcctgtgccgcttttgtgcccagtacatcattatcgataatagccttgttcattccgatagaatttttccaatagttgctggaacctgcatatttgttggcatattgaatacggatcttgtcactggcgttcattacttctttcaaaacagctagacgggctccacgaatgcggatgcgcggttcgttttccgattccatgcgttcttttacttccgatacggtcagataacggcttgtacttccgggaaatcccataatcatggcatagtctccttctttcaagcccttgatagaaataggcaaatgtttttttgttttcaagggagtattgcttgtactgtattctgccggctctccgttggcatccgcataaatacggaacatagagaagtcaccggtatgacggggccacatccagttatctgtttctccgccaaacttaccgatagaagaaggaggagctgccaccatacgcacatccgggtatactttcttatagaacatatagaatttatttccggcatagaatgggagtgcctgtggcacgattcctttcttgtctttcagatcactttttgcatacagctcttctgccagtttctggagaaacgcaccgctgaatgattcagtctcagtgatttctttagcagcaatcttagcattgacaatatcagtgatatcttcgatacgttcgataaatgtaaatttcaatcccggagtaggaagttccatctctctggaagtagcccagaaaccatccgtcagataatcgtgttcgacgctgctatgttgttggatggaagcatatccgcaatggtgattggtcaggatcaatccttccggtgagataatctctccggtacagcctcctccgaagataccgacagcgtcttttagggaaactccatgggggttatataaatcttgcgcttccagtttcaaaccttgttttttcatcatgtctatggaatgctgctgttgcattagctgcaataaccacataccttcatccgctttagcggaacatacgattagcgcagtcagcgccaataaataaagttttagtctattcattctttaatgctgataattaaaatatttatgattctattttgtcttttccactctcaactctccacttctcaaagcttccatgatattggcaggcggacgttggttcattagttcattcttcatgaaatccatataaggcgctacgtgcttaaagaatttgtaatatcctttgcacagataattcaagccgggttcgccttccgatgtacggctgaagcgattcttcggacattctccgttgcaggcaaacaggaattcgcattccttgcactgggtggggagagattggtatttcatgttgccgaagtgatgttggcgttcactgtgcatcatttccaccaatgtctgattatagatgtttcccagtttatattcggggaaaacgaagtggtcgcacgaatatacatcaccgttgaattccataacaccggcgtgtccgcaagtttttgccatcgtacatattcccggctgttcacccatccagtttgccagagtggagtcgaatatctgtatgtagtagttgcctacgtcttctttcacccattcgtcaaaaagagtacacaggaaattgccccattgctccggagtgacggagaaatcggccaattttccttccttgtcttcggcaagagaggcgagatgccgtccgtcttgatgcggaagaatacgttcgacgataggagcaaactgtatataatgacaatctatctctttgaaaaagtgatagaagtccagcggatagtcagcgttgaagtcattgacaacggccattgcattccattctacattgtgttttttcagcagattgataccctgcatcactttcacgaaggaaggtttgcccattttgtttttacggtattcgtcatgaaactcctgtggtccgtcgatagaaactcctaccagccagttgttgtcgtgaaagaaccggcaccattcatcggtgagcattgttccgttcgtctgaatacagttgtcaatggtacgtccgcgtgcatatttcttttgcagttccatagcctttttatagaaagaaagcggacgcatcagtgtttctcccccgtgccaggtgaaaagcacctgtggcatggtttgtgagttgatatactcgtcgatgaacttttccagaagctcatcgctcattacgtgtttcgggttatctttgtatagatttgccttttccagataatagcaatagtcgcaagccaggttgcatacggcacctaccggctttaccatcacatagagaggtttggcaaaaggggcgtaagttgatgttttcatagccgcaaaattagataaactaaatgaaaaaaaaagccttctccatatgtttataaggattattaaagaaaagagacttacaagatttaaatattgataaaatgtttctctgaaaaatgaatcggttgtacctttgcacgcagaatcaaatgaatagacgaacgtgaataaacttttatctttattgtttttgctcccgtttctggcttcctgcactaataagtacaagatcgaaggaacatcttctgtgaatagtctggatggaaaaatgctgtatcttaagtccttgcgtgatggtgaatgggtgaaactggattctgctgaggtagcgcacggtctgttctccatgaaaggcaaagtcgattccgtacagatggtgacactttatatggatgatgaaagcatcatgccgattgtgctggaaaatggaaaaatcaaggtaaacatcagtaattcggatatcaaagcggtgggtactcctttgaatacggcactatacgagtttattgagaaaagaaaccgactggaggaaagtatcggagagttggaacagaaagaaacccgtatggtgatggacggaggtgatttggatgagattcattcacaattggcagtggaaggagattcgctgatgaaagagatgaatcaatatgtgaaaactttcatttccaccaactacgaaaatgtgttgggacccaatgtgtttattatgctttgcagttcgttgccttatcctattatgactccgcagatagatgacatcataaaagacgctccttattcttttaaaagcaataagttggtaagagagtttctttcgaaggcgaaagagaatatgaaactgatagaagagcacaagcgtctggaagaaaatgcttcggtaaagaagtgaatataacttctctattatcggtcttgatcttcgttctttatcatccccttatgtttctccggtaaagcactttcaacggcggcgtatgcttccgccatagtcgctttgatattttccataccttttcctttaggcggaataggctcatgaatcgtgagaatcatgcggtgacggtgtatccatttgcctatacgcgggaggatctcaaatgagccgtcaatggtgacgggcactactgccagttgtaagtcatccgccaattgaaaagctcctttcttgaaataccccatgtgtccggtgaaagtacgagccccttccgggaaaacgaccaaagatactccgtctttcaaagagtccttcgcctgccggatcgtttccaacactttcttcggaccggaccggtctacaaaaatgtgccctgcgctttcgcaggcttttccaacgaacggtagtttacgcagactttttttcatcatccatttaaagtttcttccgataaaaccgtagatcaggaatatgtcgaatgaaccttgatggttgggtacaaaaatataggaagttttatcatgcaacttttcacgcccttgaatctttacgggaatcagcaggaacagacagattaattgtgaccatatctttcccggataatatccccagatgtgggctcctcccaaaagagaacctacgatggtgacgagtgccgtaaggatagtcaacactaataatataggtaaagcgatgcaaatctgataaatataataaagtatcttcatagggttggatttttacattgcaaatatacatgattattgtaaaaaagagatgcggataccatataatcttttcgattgtgttatttttgtctctcgttattagagatagctgttaaaaatatgatacgtatattacatactgccgattggcacttggggcaaacgttcttcggttatgaccgtacagaggagcatgaggcgtttttagattggctggcgggagaaatcctccggcaggagattgatgcattgattatagccggagacgtgtttgatgtttccaatccttcggctgcttcccaaagtatatattatcggtttatataccgggttacggcggagaatcccaatctgcaaattgtgattgttgccggaaatcatgattcggcggcacgtctggaagctcctttacctttgttgcaggctatgagaacagaggtcaggggagtggtacgtaagttggaaggcggagcggttgattacgaccatttatgcgtggaactgaagaaccggcagggagaagttgaattactttgtatggcggttccttttttgcgtcaaggagactatccggtagtacagacagaggggaatccatattcggaaggggttcgtgaactttatacgcagcttctgcgaaagttgtggaaacgccgtaagccgaatcaggccattcttgccataggtcatctgcaagctaccggttcggagattgcagaaaaggattatagtgaacgcacagtgataggcggactggagtgcgtgtcaccggaggcttttcccgaacagatcgcttatacggctctaggacatattcataaagcgcaacgggtatccggccgggagaatgtacgctatgcgggaagtccgattccgatgtcttttgccgaaaggcattatcatcacggagtggtaatggtggcttttgacggagggtgtgcggtagacatccgacggatagaatgtccgaaatcaatacctttgataagtgtgccgagcggtgagccggaattgcctgaaaagatattggagatgttgggcgaattgccggagacggaaggaaccgctccctatctggaagtgaaggttttgctggaagagcccgaacccatgctccggcaggagatagaggatgttctggcggataagaattatcgcctggcacgcattgtctcttcttaccgtaccggtgcggaaaatgtggagaaagaggagacagactggaaaaaaggattacaggagatgtcaccgttgcagattgcacagtctgcatttgagaagatttatcagtcagaaatgccggaggatttggttgatttgtttcaagaagcctatttggttgccacccgtaaagaagaggaggaaagatgaaaatattagctatacgattgaagaatcttacttccattgaagggacggtggaagtggatttcaccgctgagccattgtgctcggctggtatattcgctatttctggtcctacgggagcgggaaagtcaaccttgttggacgcgttatgtctggcgttgtatgataaagcgccccgtttcgccgcttcggtggaaagtgtgaatctggcggatgtaggggataaccggattaatcagtccgatgtgcgtaacctgttgcgtcgtggcacaagtgacggttatgcagaagttgattttctgggagtagacggacaccgttaccgctcttgttggtcggtgagacgtacacggaataaagtgagcggctctttgcagccgcaaatgatggaggtgaaggagttggatacggggaaagaatttcaagggacgaagaaggagttgctggcacagttggttgagttgatcgggttgacgtatgagcagtttacccgtaccgtattgttagctcagaatgactttgccactttcttgaaatctaaaggagcggctaaggcggagttgcttgaaaaactgacggggaccggagtgtattctttcatttcgcaggaagtgtttgcccggaataaggcagcgcaggaagaggtagctttgattcataataagatgagtgtgattgaattgattccggaagaggaacagcttgccttgcagaaagaaaaagagttgttggctgaaaagcgttcggaaggaatcaaattgctggcggaacagaatgcgcagttgaatgttgtacgttcattgaagacgcaagaggagctccggacaaagaagcagaaagaggaacaaggagaacaggccagactaaagaccgctttggacatattggcctcgcaggaggaaggcttggttcgtttcaaagcccaatgggaagctatacagccggacttgaagcgagcccgtcaactggatgtgcagatacagtcccaacaagagggttatatacagtctcaacaactattgcaggcagcccgcaagcaggtgcaggagcaggacaagagaaaacggatggttgaggaacagttgcatttgtcttatcagaccttacgccgtctattgaatgttgcagggacggaagacagtctgcgtcttgaacaggtggaagaaacgttacggcaggaagagggaaatttgtctgccggaatagaaacgaacgaaaaacgcctggagcggttgaatgctttcggatatccgtcgttagctgaagaacaggtcaagttgcagaaagaattggcacgtcagcagaatatccggcaattgacggaagcgttgaagaaggcgatgtcggaaatagagcatttggaaaaagaggcggcagattgttcgaaggagctttcggaacgggaagttgccttgaaaacagtacaacgtctttatgaaaacgcccgcatggcggtagggaaggatgtgaaagctttgaggcggcagttggaggaaggagaagcctgtccggtttgtggtagtacttcgcatccgtatcatcgggaacaggaagtggtggatactcttttccggaatatggagcaggagtataatgcggcaacagcggtttatcagcaggtgaacaaccggagcattgccttgcaacgtgatttggcacatcagaagatgattgcggggcaggtacgtgaacaattgtcggctttccaaaaagaaagcgctgacaccggaaatgaggaacagatacaacaacgcttgggagaactggcgaagcttattttagaataccgtaatctgtatgcggaatggcagcggggtgatgaagagataaagaagttgcgttcgcattatgaagccttgcgtgagaatgtttcccgatgccgtttagccatgcaaaaggtatcggctgccaatgaacagtcggtgctattacagaatgccgcgattgccgaacaaaagcgttttgaggtgatagagaaagcattggatacacttcgtcgggaacgttcgggcttattgaaaggaaagagtgccgatgaggcggaagccgccgtagcaaggcgggaaggagaattgaatctggcgttggagaaagcccgtaaggaggtagagacggctcaaaacggactttccggcttgcaaggagagctgaaacagattgcttcgtctattgaagagttgcaagtgcggcagaagcaaattgaataccccgaacagctttcggaagcaataaagaaacaacaggaggagaatctgaatacggaacgcagcctttccattattgaagcccgtttgttgcagcaggctaagaataaagcggcggtggagcagatagcaaaagaactttcagagaaacaatcggttgccgaccgttgggcaaagttgaataagctgattggcagtgcagatggagcaaaattcaaagtcatagcgcagagttataccttgaatctgttattgcttcatgccaacaaacatttgtcttatctttccaaacgctataaattgcaacaggttcccggtacattggccttgcaggttgtcgactgtgatatgtgtgatgagatacgaacggtttattccctttccggaggcgaatcattcttaatctcgctggcattggcattgggattgtcatctttatccagcaataatttgaatgtggagtcgctttttatagacgaagggttcggatctttggatgcggaaagcctgcgtacggctatggaagcattggagcaactgcaaatgcagggaagaaaaataggcgtgatctctcatgtgcaggaaatgagcgaacggatttccgttcaagtgcaggtacacaagaaagtgaatggaaagagtgtgcttagtgttgtaggataagcacactctttcctctttattatctgaattcgtttaattcgttcagattctttttgatttcgtggatacggtttaggaacttcttgcggtaaatccataagatcagtcctagaccgcctccccataacaggacaaaaaaggaaatcatgcctataccgtattgccatacttgccagtaaatgaatgaaagaacagccaataccagaaggaaaaagatggcaaacagacgctctctgatggtccatcggtggatgcggttgacacggctgattacttctatcaaaggcatttcgtctattcgggtccgttggaggtagcgggtagtgacgatatcccagcaaagtgcgggaatccaggctagaaggataatgatatagatagggttcagcctgttgtgcaacaggacttccgccaagaacaggatcagtatcggcagggaaatcagaatcagctttatgttcagattggcaatggcatgaatgcccttgccggtatgtcccagcaatttcgaaagttcctcttctttaatgagctctttgtccttcaggtgctcatcgagtacattccaggatttcttcaattcttccagttccatatatctttagtcttcctttttcattttttttagtttgtctttgatgcggcttaacttggtagccacattcgttaccgtcagtccggtaatctccgcaatctcctcgtaactcttctcttcgagatagagcaggatgatggatttgtcgagttgccccaattgattgatcatccggtaaagctgtttcagcatttcattgaccggatcatgcgcttcgatactccagtcaatctctttggtgaggctgacaatttccggtatattcttttccttgcgataaaaactgatgcaggtgttgagggcaatacgataaatccatgtcgatattttacactctttcctgtattttggataggctttccaaaggttcagcacaacatcctggtaaaggtcgttgagaggggcattgggattggcgtacagataacacaccttatagatcacccgttcatattcacggatgactgacaagaattcttgttcaacaagcctgtctgtttctgccgactgttccctcatgaacattattgtaaattggcagccaggaatttgcgtatctctgccacactcttattccgacggcgggcataatcttcgagttggtcttctccaatcttccctactgaaaaatattcggaagccggatgtgagaacataagtccgcagacggacgcgtgaggatacattgctccgttttcggtcagtgagatacctatccgtttcatatccaatagttcgtccaataggaaattgacggattggtcgggcaaagacggataaccgaccgccggacgaataccttgatatttttcaactagcaaatcctcaatgcttaaattctcatctttcgcatatccccatacttcttttcgtacatactcatgcatcttttccgtagcagcttcagccagacggtcggaaagagtttggacaagcaaatgtttgtagggatcttgttcgtaaagcccttccatatccgcatcgatggaagcggcgaaagcgccgatcgtatcggctatgccggaagatgacgggcgcacaaagtcacttaaacaaaggaatggactgccgtctcttttaggtgtttgctggcggagtaaaggaaacgtgatgtattggttttgttccttttcaatcaccagattgtctccgtcggagtttgctttacagagcttgaagattgtctttacttcgtaatccttgtcgagcagatccagcatacggttggcctctttgaaaagctgcatggcttcggaggctttattccgttcttcttccggaaaagtggtcagccatacggcacggcaggcatcgcatccgtgaatgttggtgatagccgcgaaacgcggttggaacccccatgcgtggaaaaagtaaatccagttgatgtagggggcgaccgtatgtattttataagataagactgtaggttgcataatgtggcttgtttttctgtttgagaaattcacttactatctgaaccttaactcttgtccacgatagttctcgtctatctctccgttattacatagcagatgcccgtttgcaaaagtcttttctactctccaattgaatgtatgtccctccaacgggctccatttgcatttacttaaaatgcagtctgccgttaccgtccaattgctgtccggacgtactaacacaaggtctgcctgataacctttccggatgaatccccgattctgtatttcgtacatttgggcaggagcatgagccatcttttctaccactttctctattgtaaatactcctttgtccactagttccagcatactgaccagtgaaaactgaatcattggcattcccgacattgctttcaatgctcctccttctttttcgcttagtaggtgcggagcgtggtctgttgcgatggcgtctatcaaaccgctattgacagcctcctgcagggccttccggtcttttgctgttttgatggcggggttgcatttgatgcgtgcgcccagtgtccggtaatcttcctctgtgaaaagcagatgagaaacacaggcttctgccgtgattcgtttttgtgacagaggagcgtttgagaacagactgagttctttggcagtagagatgtgcatgatatgcaggcgggcatttgtttcacgtgccagttgtatcgccagctccgaagaacggtaacaggcttcctccgaacgtaggagcggatgaagggacagcggggcatcttctccgtactctttcttaaatttatccgtattttctttgatgattccctgatcttcacaatgggcggcgataagcaaatcggtaccgccaaagatattgcgcagactggccatccggtctaccagcatattaccggtacttgaacccatgaacagtttaacgccacagacacggtgtttgtccaactttgcaaactgagtgtaattgttgttggttgctccgaaataacaggaatagttgacggcggatttctcgcttaataaagcgaatttctcatcaagagcttccaaagtggtagtctgtggattggtattcggcatatccatgattgaggtgacgccacccgccgcagcagcacggctttcggtgataatatccgccttatgggtaagaccgggatcgcggaagtgtacgtgctcgtcaatggcacccggcaaaagataacatccggttacatctattatttcatcacagggggcagacgctttttcttcaccaaccaatatctcggcgattttctcgtcttcaatcacaaccgaacccggaacagttcttccttcgttgacaataatggcattttgaatcaatgtacgtttcatttcttttgcgggaatttatggaaccaactatttacttttaatttaatcacaccgaatatggcttctccaaagatactgctattcatcttggaagtacccaattcgcgattgatgaatatcaccggaacttcaatgattttgaagccgcacttataagccgtgaatttcatctcaatctgaaaggcgtatcctttgaagcggatgtggtctaaatctatcgtttccaatacctggcgacggtagcagacgaatccggcggtagtgtcgtgcacggggattcccgtgataaaccgcacatacttggaagcgaaataggacatgagcacacgtcccatcggccagtttactacgtttaccccactgacgtaccgggaaccgatggatacgtcgcctccctgttccgcacaggcctggtacagacggggcaaatcgttcggattatggctgaaatcggcgtccatctcaaagatatattcgtatgtatgttccaatgcccatttgaatccggtgatgtaggcggttcctaatcctaacttccctttacgctcgatcataaacaagcgttcgggaaactcttgttgcagggtttttacaatagttgccgttccgtcgggcgaaccgtcttctattaccagaatatggaatactttgggaagtccgaaaacggcacggataatattttcgatattctctcgttcgttataagtaggaataattacaatgctgtctgatgtctgcatatagatactataatatttaagaacaaaagtagttcttttcctttagttatagatgaactaaggaatatttaacgtgttctgcggctcattatggataactccgtacctcaccggaattaagcccacaccttacgggaggtaagcccacgtctgactgatactaagcccacgtctgagcgatactgagcccacgcttcaccgagactcagcccacgtctcaatggcgctgagcccatagctcggtaattcttactgtgtatttcttgataatacttccatttttaaagtatgtactcccaatcttttttgtacttttgcggtgaaattttataggtatgacaataactgagttgcaacaacaatatgctgcccaccccaatacggcagtaatgaagcgcttgttgaaggacacttctgttcaaactgttttttgtggaggactgtatgcgtctgctgcttcccttttttcttctgtattggtgcaagagggtggttgcccgtttgtgtttatcttgggtgatcttgaagaagccgggtatttttatcacgacctgacacagatattaggctcggaaacggtgctttttttcccatcttctttccggcgttccatcaagtacggacagaaagacgcagccaatgagattttgcgtacggaggtgctgagccgtctgcagaaaggagagaaaggattgtgtatcgtcacttatcccgatgcgttggctgagaaagtggtatcccgtaaggaactgagcaataagaccttgaaactgagtgtgggtgaaaaggtggatactacttttataacggatgtgttgcatagttatggttttgaatatgtggattatgtatatgagccgggacaatatgccgttcgtggcagcataatcgatgttttctcttttgcttcggaatatccttatcgtattgactttttcggtgatgaagtagagagtgtccgtacctttgaggtggactctcagttgtcccgtgagaagaaaaaggaagtgtctatcgttccggatttggcagtgacgggagaggtaaccacttcttttctggattttattccgaaagaaaccgtgctcgccatgcgtgactttctttggttgcgcgagcgaatccaagtggtgcatgatgaggcgttgactccgcaggcaatagccgttcaggaggccgaagagaatgggggaattacgttggagggaaaattgatcgatggcagtgagtttactgtacgcgctcttgatttccgtcggttggaatttggtaacaagccaaccggaacgccggaagccagtgtctctttcagtacatccgcccagcctatctttcataagaatttcgatttggtggcttcctctttcaaagagtatctggagaaaggttatctgctttatatatgtagcgacagcacgaagcaaacggatcgtatcaaggctatttttgaggatcgtggtgataagatacaatttactcctgttgagcgtaccattcacgaagggttcgttgataatacgttgaggctgtgtgtgtttacagatcatcagttattcgaccgtttccataagtataatctgaagagtgataaagcccgttcgggaaaggtggccctttccttgaaagaattgaaccagtttactccgggcgattatgtggtgcatacggatcatggtatcggacgtttctccggtctggtgcgtattccgaatggagatactacgcaagaagtcctgaaactggtttttcagaatgatgatgtggtatttgtttctattcattctttgcacaaagtttccaaatacaaaggaaaagagggagaggctccccgacttaataaattgggcacgggtgcgtgggagaaactgaaagagcgtacaaagagtaagataaaagatattgcccgtgatctgattaagctgtattcgcagcgccgccaggaaaagggcttctcttatagtccggatagtttcttgcagcgtgagctggaagcttcctttatttatgaagatacaccagaccagagcaaagcgacaattgatgtcaaggcggatatggagagtgatcgtccgatggatcgtctggtctgtggggatgtgggatttggaaagacagaggttgccatccgtgcggctttcaaggcggttgccgataataaacaggtggctgtgcttgtgccgactacggtgcttgcttaccagcatttccagacattccgcgaccgcttgaaaggattgccttgcagggtggaatatttgagccgtgcacgtacggccgcacaatccaaggcagtattgaaaggattgaaggagggggatgtcaatatactgataggtactcaccgcatcttgggaaaagacgtccaatttaaagacttgggattgctgattgttgatgaagaacagaaattcggagtctctgtaaaggaaaagttgcggcaactgaaagtgaacgtggacacattgacaatgaccgctactccgattccccgtacgcttcagttctcgctgatgggtgcgcgcgatctgagtgttatctctacgcctccgcctaaccgttatccgattcagacagaggtgcatacctttaatgaggaggtgattacggatgcgattaattttgaaatgagccgtaacggtcaggtgttctttgtcaataatcggatagctaatttgccggaactgaaagcgatgattgagcgtcacattccggattgtcgtgtagctatcggtcacggacagatggagtcggcgcaattggaaaagattattttggattttgtcaattatgattatgatgtccttttggcgactaccattattgagagcggtattgatatcccgaatgcaaatacgattataatcaatcaagcgcagaatttcggcttgagcgatcttcatcagatgcgtgggcgggtaggacgtagcaataagaaagcgttctgttatctgttggctcctccgttaagcagtcttaccgcagagggaaagcggcgccttcaagcgattgagaactttagcgatttgggaagcggtattcacattgccatgcaggatttggatattcgcggagccggtaatctgttgggggcggaacaaagcggatttgttgccgacttgggatatgagacgtatcagaagattctcagtgaggctgttcatgaactgaagaacgatgaatttgcagatttgtatgcggaggaaatcaaaggggaagggcagatcagcggtgaaggatttgtggatgaatgtcaggtggaaagtgatttggagttgttattaccggcgaattatgtgaccggtagcagtgagcgtatgttgctttatcgcgaattggacagtctgacattggacaaagacgttgcagctttccgttctcgtctggaagaccgcttcggccctgttcctccggaaacggaagaattgctccgtatcgttcctctgcgccggttggcggcacgtttgggagcggagaagatattcttgaagggtggacgcatgacattgttctttgtgtccaatccggatagcccgttctatcagagccaggctttcggaaaggtgattgattatatgatgaagtatacccgccgttgcgatcttcgcgagcagaacgggaaacggagtatgctgattaaagatgtgtcgaatgtggagacagcggttaatgtattgcaggagattgttgcgttacctctttctgtatagcttatctatcaaatccccccgtccgatacgtctcaattcattaatgatatttttccgttcttccggcttgtaccagaagaagaattgacgttgtgccagtttttcccgttgagtcttggcgctgaatatcggttccagcgtgtagggatggtatcctgtgtaccatgcttccgtggctactgtcataggagtgggggtaaagtcctgcacttgttccaaatgaaaatccagccgtttggtaataacggcaagttccgccatatcttcttctttgcatccgggatgcgaggaaataaaatatggaatcagttgctggcgcaggttttcctctttattgattcggtcgaatatccttttgaatgtttcaaactgctcgaaaggaggtttgcgcattacggataatacccgttcacttgtatgttccggagcaactttcagtcggccgctaacgtgcttgacaatcaattcgcgggtatattcggcggtactgcggttgatggcttcctctttactacgatgcaataataagtcataacgtaccccgctgcctataaatgatttcttaatgccgggcaaggcatctaccgcgtgataaatatccaataacggacgatggtctgagttcaggttcgggcagactttcggatggatacaggacggacgcttgcatttcttacagatagactcatctttccctttcatctgatacatattggcggaaggaccacccaaatcgcttaagtatcctttaaagtccggtaactgagttacctcttttacttccctcagaatggattctttgctgcggctgacgatgaattttccttgatgtgcggaaatggtgcagaatgcacacccgccaaaacatccccgatggatattgatggagaattttatcatatcgtatgccggaatccgcttccctttatatttgggatgaggcatacgggtatagggcaaatcgaaagaacggtcaatttcttcctggctcatcgggggataaggaggattgacgactacgactttgtttccgacagcttgcgtgatgcgtgaagccgcatatttattggactcttcttcgatatgccggaaattgcttgcctgtttctttttgtctgcaaggcattcctcatgcgaatagagttgtatatcttccgtatcggaagtccactcagaggcacggcaaagataggctgtctgaggaatcgttccgatgattgtttttaaatcgttgacagtgcatacggcgtcttctgtcggcagcaaaccttttattttacgggttaattcgacaatcggcttttcgcccattccataaataagcaagtccgctccactatcgcataaaatgcttttctgcaccttatcctgccaataatcataatggcttaaccgcctcatgctggcctcaattcctcccaagatgacaggaacatccggataaagtctcttgagaatctgactgtaaacagtagaaggatagtccggccgcatatccggacgcccgtccggtgtatacgcatcttcgctacgcaatcgtttgttggcggtatatttgtttaccatcgagtccatgcacccgccggaaatgccaaagaacaggcgcggacgccccaactttttgaaatcgcgcaagtcatcgcgccagttaggttggggtacaatggctattttcaaaccttccgcttcgagaatgcggccgataacggctgcaccaaaagaagggtgatctacgtacgcgtccgcactgaaaaggatgatgtccagttcattccatccgcgaagttctatttcttttttggtagtaggtaaccagtcagtcaatcgatattctttcatgctgcaaagatacgcattatacggtgaactgtactgtcatttgttctccgtcataaatttcgcggaaaccgatgccttgttcggacagatattccttcagatcctgaaacgcatcggcatggttcatgataatctccagtgtttcaccgggagacgcattacacatcgcttttattgcaggaatcagcggactataggctgtgattccgcaagtatttactgtaatcattatgcctcctcttcttccgtttccggactggaaagccacgtcagatagagcttgataagctgttgcaagccgaatgccttcatattattgtggtaaatcacatcaatacaaaggtccagcaagtccttgctgtcttcttcctgactggcgatgagggaacggatgtttagtttcaacttgtccaaaaccgcttcgtctacaatgccggtactatcaatgagatggcggaacaatgcatatttctcgatcgttctcagattctcattagagacctctatgctgcgtgtaccgctgggatttgcttgtatagtatacatcttttctagttttaagggttattatagtagcaaagatagaacttaaaatgaaaagcagattaaaaaaagggatattttttatctctgcgtaaagaatcccagtatacctgccatgatagttgcccggtcggcttccgattgtatgctttcaaaaggaaatcccaatacgaaggtacggtagtttcctttataagcgatacctgcgctttggttgccgggaacgtatgtaaagacaggaaatgccgtatctaccggaacgatacagtcgggagcagggacggcatagctggtttcattaggtgctctcggtatggtaatcgtacgtcccaacccgttaatgcggtttgaactcttgtccgtcatgctgctttgataaccgtattttaagatcttctccgtaaattcccggttcccctgtgttccactcatatcgcttcccacgtatgcaccgctgacaaatagatttcctcccgactggcaataactggtgatgatccgttgcatggccgaagaaaatgttttgtagtatactttatggaccggatcttctttctccattcccaaaatgtagtccacaaccggataatcttccagtgtgactgtaccgttttccacagcctcgtcgctgcatgacacgaaactatatttgccagcggcttgaatcgcttttccatgaatgaaaggatagtcgaatgtgttacctgctattttcattccttccaactcgcttccgctatatcccagactgccttctccttctttcccggcctgtgcccggtcgaatcctatttgcgctccactgaatgagatgtttgataaataaggaactccgggatcttgttccaggtcgaatcctgctttgtcaaacgtattaatgacagccggtccgctgactctgtcgaatccattgattatcaatactctttcccgttcgcgtttggccttataagcagagagtatctcggacgggaagctttcaccaccccggtttacggcagttactttaaaggaataaacgagtcccggttctattttgacggtatgggacgtcttgctgactaatgtaccgttgtcgaaaccaccatagccaatgcgtgtgtatacaatgtattcacgtggctgtgcggtgggttcttgcggatcgttttcacctttccacgaaagctccaacgtattctttttctttccgaagcggatagtaaaattgctgacaggaagaggttgcactacatattctttgtcatgctggccggcaacaaactgcaagatacctttatagatggcacgtcccaccgtaaacttgaaattcggatcatgtcccaactgcatatcggcaaagttctgatgggaaagtaattcgataatggtagaaggagtagccggaagacgcgtctcgctgtaattgcggttccacatactgcgtcgtgtccaagacagattataacttgaatatatatctttctgaatctgagtgagtagaatatcggccaaatcccgtgaggcataccggtcgattcctgtgttcagttttccattattaaaatcagtggtgtatattcccaatgagccgatcagctcatccgttttgctgcatcccgcatcgctatgcatcgccattgtcatttccaaaggaatacctaaaccgggttgttgcggattatagacagaacctccggataaataattaattgtgttggagcgtgtattgatgtcatccgcataatcattttcacctttccgccccgcatatacctcgtatggcattcccgcccattgggcagagtagcgtgccccttccagataacggggcaaaccgcttgtctttcctcctcgctcaatatttcccattcctcctccgaaacgtaccgcatctgcgcatactacgccgtgctcgctactctcgttgcttagcactaccatgccgtaatcgttattgcctttgtcaaactcgaatgtgcccagataaacccaagtgcctccgcctatcttttgattcactttgaattcggtcacccctccattgtggaaaacaagatatttggcgtcgttcacgctattaggcaatgtccggtaagagacataaaccgcgtattctccttttgccggtagggtaggcacccattcggcgaaagcctggtctttattcttcttctttctttcggtcggaataaagcggcaggtcccgtctgtgaagggattttctccatctctataaatcgccttcttttgagcgaatccttttattggagcagtagcccaatgtgcttttttgcttcctacttccagataaagagaagcattaggtgtatcgttgtccacaatgatctcatttttctgagtatcccgttcgcggggagtgtaaacgattgcgcctgcgttttccaacatcgggattacgtacggaaggacaaacgactgtgtgaacagatcttccgttgtgcaaaacagacgggggcgttgccatccccattcattcttgtcgttcttgaaataattgccgtgactttgccagattgcgatatggcggtcttgcaatcctcgtgatatttcattggggcgtgaaatgttctttacccacgctttgtctttataatcggttttcaaggacatccgttccttatcctttttcttgttccgataaatattcgggataagttcctcaatgggctttccatctgcaaagatagtgagtcgatagtagtggacgggtcccggaagcagctccttcacttgattgtaaacagcttctacagtctccggtcgaaaaggctgataagcaaaactttccgaagcatggatagcaatcgttttgcgttcataatctatatcaacacttttcagcttaggtgtactgattttcgccgttacggtatatctgccgaaataatctgtcaatcgttcttttacattcctttcaatgtcctgagcagaaaggaaatttactcccaatgtaaggcataggaaaaacactattatcttcatacttgctgcttttttatactcaccacagaggaaaggaggacacaaaggggtaaatgtgaaactacataattcttttatttatgaagtcctctgtgtcctcctttcctctgtggtgaattactccgcaaaaataaacaaaaaagagcgagaagtatcccacttcccactcttcttttattgttttatattctcttaatcaagaataccttctttccttatagcggaatgtattcaacaaacgcttccattgcctcgtatgaagccaagcccaatttgtcatacaatgcagctgtaccgcgattacggtcctcgctgcgttgccagaacagacgttcatcgttacccaagaaaggagcgctttccatctgcgactgatgcttcaagatagaattacgttttgcgcgaagttcttccgggctgataggcactgccatttcaatgttctcaatttcccattcggcccaggcgccgcgatacatccagatacggcagtctttcagccacttggcaccttcttctttttcaaggtcgatggcagcgaatactgcatccgtacatacacggtgagtaccgtgcgggtcggccaagtcaccggctacgaaaatctgatgaggtttcacttcacggagcaggttacgtacgatttctacgtcggcttcgctgatcggattcttttgaatcttacccgtttcgtagaaaggcagatcaaggaagtggcaacgttccaatggaatgttattatatgtacaagcagtacgggcttcaccgcgacggatcagacctttgatagtcagtatgtcacggctgtccatatcaccgtctttcttctctttcaggaaattacgtatttctgcgtacttttcattgataacctggtcctcactattgttgaagatctggttgaatccgttgatgaagtgcatgaaacgaattacttcttcatcacctacagcgatattgccggaagtttcgtatgccacgtgtacttcatgtttctgctctaccagacggcggagagttccacccatagagataacgtcatcatcaggatggggagagaaaataatcacacgtttcgggtagggttttgcacgttcgggacgataggtgtcgtcagcattcggcttgccgcccggccatccggtgatggtgtgctgcaaatcattgaagatcttgatatttacattgtatgcagaaccataaagagccaacagttcactcagaccgttttcattataatccttgttagtcagtttcaaaataggtttgcctgtcaactggcacaaccagacaatagcgctacggatcaacttgtcattccattcgcaggaagttaccagccacggacgttggatgcgtgtcagattcatggctgccgaaaggtcaagcgctacatgcgcattgttgtgagtttgcagataagaagcaggaatagtatcggtgatcgcaccttccacacattctttaatcatagctgctttgttctcgccccatgcaagcagatatactttctttgcactgagaatggtagctactcccatcgtgatagaactgatcggagtattatccattgttccgaaaattctggatgcttcattgcgcgaggcgttatccaataaaatcagacgggtggtagagttcaagcgtgaacccggttcgttgaatgcgatgttacccacacggccgatacccagtaaagcaatatcaatgcctccgaaactttcgatacgttgttcgtagagacggcaatattcaaagattgtatctttggcaatacttccgttgggagtgaatatattctgcttgtcgatgtcgatatgatccaacagcatattcttcaaagcgttgaaattgctgttgactgcatcaggagccaatggataatattcgtacatattaaatacgatcacattacggaagctgagtccttcttccttgtgcatgcgaataagttccgtatatacgtgtcggggagaatctcctcccggaagagccaatacgcagaaacgtccggctttttgtttttcgcggatggtttgtgctatttcgcgggcaatgtagttagcgccttcttctacagattcgtaaatgtccgtaggaattttttctagtcttgtcaagactgatttttcaaaagcattctccggtctgtaatatctgggggagacccggtggagactgatttgagaactaagatttgttttcataaagttgttaattaagttatgtaagattagaattcttacgactgtattttcacgacaaagatacaaaagaggtttatataattaactacctgctttgcggtattgttgtcgttttaattggtttttaacatttgtttgatagcaactatgacagatgaaattcgtctgcatctttccatactggaaatttttctctgaattgacggagagcggacaggttgagagttgccgtagctattccttcccggccatcgggcagcgaggctatctcttctccgaaagctgaatagattttacttcctccattatagtctaaatggtaaccgtcggttcctgtccggttgacaccgcatacatagcactgattctcgaacgcgcgagcccgaagcaacgtatcccataccggacggcggggaataggccagttggctacatatatcaataagtcatactcattgtttatatttcggctccataccgggaaacgaaggtcgtagcagacttgcagacagatgttccattcgaggtagggaaggataagccgtttcgtgccggcggagaaatgttcggcttcccgtcccatgcggaacaaatgccgtttgtcgtaatagaattcttctccttccggtgtcagaacaaatgcccgattgtagaacaacccgttatccgttgcgatataacttccgcagatggctatttggaattgcctggcccatagtttgagagtggtaatggtttcaccggaattaggttctgccaatgttttgctctgcatactgaagccggtagaaaacatttccggtaaaacaacaatctccgttgttccacagagactttgcagtttcttgtggagcagacggagattttcctgtttgttttcccaaacgatatcggtttgtactatggaaatacggattgaatccacactgtttagtgattaaatctcgccaagggcaaaattctcaggatgttttccttgaaagtccttgaaataaagtttgatttctctcatgtctttatcaatatctcccgacggcatgatggctttcgttgccgaaatcatctttttgctgtaatcgataccgatcaatacgatgggtacttgcgctttcaaggcgatataataaaaaccctttttccaatttggatttgccttgcgggttccttcgggcgtgatagccaaatgaaactttttgcattcgttgaaatgtttgaccatctgatccaccaacgaagttttccgactacggtctacgggaatcccgccgactgctttgaaaaaaagtccgagtggaaagaaaaaccattctttcttcatcatgaaactagtcttacggcctaaagcaccgtaaaatagttttccaataaataagtcaaggttcgtagtgtgtggagcggcgcaaatcacgcatttatcataattggttaccgtaacgtttgtcttccaccccaataggcggtaatagataaagctataaattgctttcttcattctgtttttttagttcaattttccgatcgcttcaataatctcgtttacttttgcattaaagtctgcacggaatttcttataaaaacctttcacatttcccggttcggtgtgactgatgcggcatacaaattcatcctgcattttcagcacttccgccattagctcgtcggccttacttttgtcagtaccaggtataaacatactgttgattaaacactcggtgaacaattctcctgcgatatagtttacattctttttgagttctcttctacttgccataatctttacatttaatggtgaataataaaaaatatttgtggtaaagatagctactttctttgatttaggcgaataatatgaagaaaaaataagaaagactccttcacctgacttctatatccctttgctcatgggagaaagcgggtgaagggctgccctttcacccgtttcttcactcgagttattcgaataattttgccgggttaatgcttaagaactgttcggctttcattcctccttctccgaccacgaaagttgcataaggatgatacaaattccgcactgcttcaagtcctgcattgtacgtttcactgttgcttttaacttctatcgctacaatccggtttttctttttcagtatatagtctacttctttatccttttctctccagtaaaacacttcataattgccggtgaatgcattagacacaatatgggcgccaatggcggattcaaaaatacgtccccattcttttctgttgagaatggcttctttgaaagttaaatcgttgtatacggtttttaatgcattgttatatacctggaatttaggggcacttgccctttggcgtgatttatccattgcgaacttttgtagtccggtcagtaatccgctgtctcccagtaagtttaaatatccagccagtgttgttgtgtttccggcgtcttgcaatgctcctaccattttggtcaaggacacgatttcaccggaataggcagtccccaattcgaaagtctgccgtagcagtgccggtttactgatgggagagtcatataaaatatctttattgattgtggcgtctatgattgctccgttaatatattgcgcccatcgctcttcatcctcaatcaagaaaactgcaccgggatatccgccaaaatagagatattgttccagacttattccgaacgcatcccgcatttccggatatgaccaatgggtcattctgatttcttcgaagcgtcccatcatggaatcggatagccctttctctaacaatacacgtgaagagccgagcagaacaactttcatgttgatatcattgaatgtatctgcatcccattctttttttacgacctcgctccaattctttattttctgaacctcatcgattatcagaatgaactcaggtagattttcaacccgcatctgtactcttgctgtattccaacaatctgaaatccaagatgtctgtgtggcgggaatgctgtctgccgaatagatttgataaggtattttcaagtcattgactacctgtttgataactgtcgtttttcctacctggcgaggtcctagcactacttgtagaaaatgccgggactctttcagtctttctgtaatgatttgatattgtgctcttttatacatacttttaaattttactcaatggatagcgtaattttactcaatgcattgattaattttactcaatagataacgcaaatatacataatcagtagctcattatctaccttaacattattttttatccttgtattttatatctacggaaacccggtagttacccggaacgggagtgtagataggttgatgggtagtccctttgttttggagtttcttttccgcaatcagtcttttgatatgccgatatgccgtaatctgtgtcattccacagagatattggaagtctttccgagtaataatatgattctcggcaaagtatttcgtcaattccatgtctatctcagtgttggacagttcggtggagtgaggtttgtattttgaacgcttgaagtgcatatccgaaagttccgctttcaactccttgtccgccttgaacttgatagcttttaatttgactttgtgcactcgttttgccttaggatctcgtatttcttcttcacagctaagagtgacttgcagatatcccaatccctcgatatgcactttctttccttccttgagacattgagccacttcgtatttcaattcttccagtgtagctataacgtccgacggacttaatgaacagcgttcgtggatacggtaaaccaaattttccgtatctactgtttcataactgatgggacgtgcgtgatacctcaccttattctttttctccttcggcataggagtcttatatagttcaaattgtacagccatactactttcttctttctttagatgtttatagattatcttccgtatatttctcgattttcttccggatatctattacttatcattattgtgataagtacttatcatagcaatgatacttacttatcatagatgtgataagatattgtcattattgtgataagataagaatgtccgcatcaaaggtaaggcttaattaggagataaacaaggaataaccggataaagtacgaagttcatttatatgaaaatgagtggattaaaaagttgcaaatcccatttttcaggtattatattcgcaaccgttaaaactaaaaaacggaaattttatggaaaagaaaagtgtattattggtatggtggcggaaaattgtaaatcacttttgtaaaagtgaagtagaaaagcgaatagaggaaacagaaatgcctcctaaaacgaagaagttgacagaaagcgtggaatgtttcttgaaatctcgttatgattttcgctataacattctgacggaagaaacggaattccgttcgatggagcaggtggaagaaggatttctgccaatcaatcaacgtgtgttgaatacgttatgtctggaagctcatgagtcggggattccttgttgggaccgtgatctgtcacgttgcatttattccactcgtattgcggagtatcatcctttcagactctatttggatgaattgcctacgtgggatggcatagaccgattggttgatttggcacggcgggtttctaccgattcggcttgggtgaaagagtttcatatctggatgttgggaatgactgcgcaatggatgggaatcatgggagaacatgccaatagtgtggctcctttgcttgtcagtacggaacaggggtatctgaaatctactttttgtaagtctctgcttcctgctgcgcttcagcgatattatatggataaggtggatttgacaagtgaagggcgggtggaacgaagattggcggagatggggcttctcaatcttgatgaatttgataaatatcctccgacaaaaatgccgttgttgaaaaacttgatgcagatggcttcattgagtttatgcaaagcatatcagaaaaattatcgttcattaccgagaatcgcttcttttatcggaacatccaaccggaaggatctattgacagatccgacgggtagcaggaggtttatttgtgtgatggtggaatgtcctatcgattgtaatgggattgagcataagcagatttatgcgcagttgaaagccgaaatcttgtcgggcgaacgttattggtttacaaaggaggaagaacaggtattgcagaaaaataatctgcctttttaccgtcaaggtccggtagaggatgtattgcgttcttgctatcgttctgtagaaaaaggggaggagggtgaacttcgttcagcagccgagatctttcaatgtttgaaaaagcagaatccgtcagcgatgcgtggggcgaatccggcaagtctggcgcaaattctggtagcggtggggatagaacggaagcatacaaagtttggaaatgtatatcgggtggtaaaaattgggtaaaagagagcagatttggatgatggcttgagtgacggcttgggtgaaggaagcccccttcacccgctttagcccatggatagggctctgtagctaaaaggtgaagggcttataaaaatcacttggaatgtgaggggcactcgaaaataatgtttatctttgaataattattaaatgaagaataactatggatagtgtgatgcgcaaatttcctattggtatacagaaattcgagagtttgataacattaccagctttggaaaaatagtggaggataattgttgatagagattatgctggacgttattttgattatcattggtgctctctgtatgattgccggattagctggttgtattcttccgtttcttcccggccctcccattgcttacttgggactgtttattctccattgtacagataaggtggagtacagtactacgcaactaattgtatggttgctgattgtggttgtattacaggtcctggattattttactccaatgttgggcagtaaatacagcggtggcagtaagtggggaaattggggatgtataataggtacccttgtcggtcttcttttcttgccatgggggattattctcggcccgtttctgggagctgtcattggggaactgttgggaaataaggaattctcacaggcgcttaaatcaggattcggttccttgataggattcatattgggaaccttgttaaaactggttgtctgcggttatttctgttatcagtttattgccggttttgtttgataaatataaataaagctgctctccggaaagaagaacagctttactgctttgtttactttatttcaggctcatttcaccggaatcttgtcgatacgtttctgatgacgtcctccttcaaactcggtagagaaaaactcggttaaaatcatgtccgcttcttctgtgctgatgaagcgtcccggcataaccagtacattagcgtcattgtgctgacgtgccaaatgcgcaatctctgcattccaacaaagagctgcacgaatcccctggtgcttgttcagtgtcatattgattccgtttccactgccgcagatagcgataccgggataacattcacccgattccactgcaagagccagcgggtgggcataatccggataatctacacttgctgcagagttggtcccgaagtctttgtaagcccagccttttgcttccagccagccgcgaacatattctttcagttcaaaaccggcatggtcgcatgctaatccgattgttttcattagagcattgcttttacttggttatatacattttcggctgtgaatccaagtttctcatccagtactttgtaaggtgcagagaaaccgaaagattccaagccccatactttgccatgacagcctaccagaccctgaagagtaacaggcaaaccggcggtcaaaccgaaaatcttagcatttgcagggagaacagattcttggtattctttagattggttacggaacagcccttcagacggagcagatacaatacgtacttttacgccatctttgcgaagcaactctgtaccggctactaaagtggaaacttcagaaccggaagctactaaaactacatcaggattttcgtcagaaccggccacgatataagcgcctttcgctgcttgttcgtaatctgttccttccggtaagttggcaatattctggcgggagaaaatcagacctgtcggagtggacatattctccattgcaagtttccatgcgatagttgtttcttctgcatctgccggacggagtaccaacatagagttgtgtcccttgtggtttttcagcttttccatcaagcggatttgcgcttcctgttctaccggttcgtgagtagggccgtcttcgcctacacggaacgcatcgtgtgtccaaatgaacttcacgggttgttccatcaatgcagccatacgtacggcaggtttcatgtaatcggagaatacgaagaatgtaccgcaagctgcgattacaccaccgtgaagcgacataccgatacagatacaagccattgacagttcagatacacctgcctggaagaatgctccgctgaaatcgcctttcttgaacgaatgagtctttttcaagaaaccgtcggtcttgtcagagttggaaaggtcggcagaagctacaatcatattttctacttgtgtagcgagggcacctaatacggttgccgatgcggcgcgagtagcgctgcctgctttctgttcgatagcggcccaatccactttcggagctttgccggagaagaacagttccagtttggctgcaagttccggattagcttttgcccatgcggctttcactgcatatctttcagctacgatctttttcaattcttctgcacgttttgcatacagttcggctacttccgggaatataacgaacgggttggtaggatcaccgcctaaattcttaattgtatttacatatgcgtcgccaccgagaggagcaccgtgtgtagcgcagttagcttcatagctgctaccgtccgctttgcgtgcgcctttacccatcacagtcttaccgataatcaatgtcggacgttccttttccgcctgtgcctctttgatcgctgcacggatttcgtcaggatcgttaccattgatactcagtacgttccatccccatgcctcatacttcatggcagtatcttctatagttacatctttcgtttctgtagaaagctgaatgtcgttggagtcgtagaacatgatcagattatccagacccaatgcaccggcaatacgtccggaaccttgagaaatctcttcctggataccgccatcagagatataagcgtagatagtctgattcatcacttcgttgaagcgtgctttcagaaatttagcggcaatggcagcacctacggcaaaggtatgtccttgtcccagcggaccggaagtattttcgataccacgcatgatgtccacttccggatgtcccggagtggggcttccccattggcggaattctttcaattcatccaatgtgaatttaccggtcagtgccaatgttgaataaagcattggagacatatgtcccggatcgaggaagaaacggtcgcgtccttcccagcggggattctccggatcatatactaaaaactcagaaaagagtacattcacaaagtcagcaccacccatggcgccacccgggtgaccggaattggctttctcaaccattgaagcagcaagaatacggatgttatccgctgcacgattcataagtttattatcgttcatatcattaaaattaattgatttctgtaagattgttggcaaagataactctttatgtggatttaacaatccaaaagagctatcttttttgttaccattttacttgccttcttgtttataatacaataagtaatagcccttgatttactgtaactctaaagtaacaatcgacttagcaggaagttttaccttcattgtgcctttattgatttttacctctttgaaaggtgccggttttacaatattaggattttcaaaagaattgtaatcggtgagttttgcagaggtcaggatttctccggtagctttctttgcctttgtgtctcccagattgatggtgatttcctgtgtttcatcggcatttacgtttgaaagggaaatatggataacaccgtttttgtctttggaggctgtggcgcttaccatcggtacggtacggttatcgcgtacattcatcttttcacactccaggtcgatagggagataagtggcgtcttgatgtaccttatacattttgaaaacataatagctgggagtcagtaccatctcttttccttttgtcagaatcatggattgaagtacattgacaacttgtgcgatatttgccattttcagacgatcggtgtatttatgaaatacgtcaaggctcaaagaggcaacgaaagcgtcgcgcaatgtgttttgctgatagaggtgtcctctgatggttccgggttcttcgtcccaccaagttccccattcgtcgagtaaaagggcgatttttttatccttgtcatatttgtccatgatggcgcaatgttttttgaggacttcttccacttcgaggcatttgcccattgtccaataatagtcgtctttgttgaattgagtagcggaagttttactgccactccagcccgttacggtgtaataatgaagagaaagaccttgcatacggtgtcctacacgattcatcaatacatcagtccagttatagtcgtaatcgctggctccgctggcaatcttgaagagacggttgccgtcatagttgcggcaataggtggagtaacgacggtacaggtctgcatagtattcgggacgcatactgccgccacatccccaactttcatttcctacacccagatatttaatcttccatgctttgtcgcgcccgtttttgcggcgaaggttcgccataggagagtcaccgtcagatgtcatatattctacccatttggcgagttcctctaccgtaccgctgcctacatttccactgacgtatggttcgcaacccagcatttcacacaggtttagaaactcatgagtaccgaaactattgtcttcaatggttcctccccagttgttatttaccatcttcgggcggttctctttggggccgataccgtccatccagtggtattcatcggcaaaacaaccacccggccaacgaagaacaggaacggcgagttcttttaatgcattgaatacatctgtgcgatatccctttatattaggaatatccgaattctcgcctacccaaagaccgccgtagatacatgaacccaaatgttcggcaaactgaccgtaaatttctttggggataatttctttaccttgatcggcgtgtaaagtgatggtagcgctcttttgtgcagaaagagatactgaagctgccaaaaaggctgtgctgactaataattttgctttcataaatggtatttgtttaatgattgtttttttattttagcaaacgtacttcgtagatggcaggagtccattccgtcccgtcagggatgaaacgtatcggacaattgcccgtgttcaacttttggggcagggcataagaaagagtaataaaaccgcctttgtccgcttcactgattgtcggtttaacagccaacttttcattattcaagaggatagccattttgttccggtcatctttccgtatcgtaatcaggagacggcttgcttcctcttttactttcagttgatagccgaaccaacctttggcacggcggaagtgtctgtctttatccgttccggtttctgcctgctcatattggatagcatggtcagactccggctgctgttcaccgggaaagataagatcaatagtttgattggctaattcggccgtttctcgttcggctgttgccatttcttcctgaatggctttgaagcgctcttcacttgtctgccggaagtaaatggcataacgggaattatgcaggcggaagaaaggaacgagttccaatgctttgccttgtgccggatagacatctccattgtagcggaaagcgatccggttccccttttctttgtgaagatctttgcatattgaattgggagctcctatcaacatcgggacttcctgcaaaggaatttgtttgccatgtgcgatatgtccgccgcgactgtcatcggcatacagaccatcgagatgttctgtgcctgtggaagctgcaagaacgataggaccgtataagaaagcataataatctttcttgtcggggatttgttcaatagtgactttcatcggcaggttgaaggttatgacgtctccttttttccatttacgggaaagaggaagatattgatttccttttttcgtgggaaacgtttctttcttcccattaatgctaattgaatagttggaagattggttagcccattccggaatgcgtatcattaaagtacgttgtttcttagaagctttatctattcgcaaagtaaccttattgtcatcgggaaagcgggtttcctgtgtcaagatgacgccttgttctttccagttcagttgtgaggggatgaaaagattgacataaagcgtatctttctgatgcgcataaatgaattcaccgtatttggtatggttctccagaccagagccgacacaacaccacatagatgtttccggttgtgaataaacgcggtaatgtcccggtcgcataggagtgaagtatacaaatccgcctttatccggctcttgagacgctaagatatggttgtaaagcgcacgttcgtaatagttgatgtagttggggtcgggctcatttatattgcagggattgtgagagttctgataaagcattttagtaaggcggagcatattgtaggtattgcaggtctccggcccttgcacatcgtttatcatggaggtaaaattatcggccgggtggaaatgctcgcgtacactattccctccgatacagacagagcgattgttgacaaccgtattccagaagaaacgggctgcatgatcccattcttcggcgtgattccaatttttgtcgtcctgtgaaagttcggcgattcgtttgtaaccgatcactttcggtatttgggtgttggcgtgcatgcctgtcagtcggtctttatctttgataagcggatcaaggataatcttatgggagaaccgacgtgccagttccaagtactttttatctcccgtaattgcagctacgtcagcgaaagtctcgtttagtccgccatgttcgctacggagcatgtcttgtatttgctgatcgctcagaccggaagttatgtcgatcatccaatctgtaaaagcaatcaacatccggcgtgcctggtcgctgcctgtatagaggtaggcgtcccgtaatccggcgtatgtcttgtgtatattgtagagaggcacccatttgccattgaggtcgaaacctccggcacggatattacctgctttaatttctttccaaagttggagactgcccggagttcctccgataaaacctgttccgacagcttgttgggcacggtatagctcgtcaagcatatagttaagccggttgtaaattgcggtatctccggtagcggcatacatcatggagagtgcggataaataatgtccgccgatgtgtccgtccagtccggtgttttcccaatttgtataactcggagctttcggagtgagtcccgcttcgcgtaagaaaggagccagcaagcgatcgggattaagggcgagtatgtaatgcaaatcagtctgttgggcttgtaagaacgggctatccaatagtttgacgtcttgtaaggggaagtatgaaacctgtggaacgttctgtgctttagacagtgaggcggatagaagaagtgcaagtatgaacggtgtggttttcatgataatagtttccccttgtccctctcctttccggagagggaatgggaatagtttatgttaatacttaggtgattaagaaagaagcggagagccctccatgatgagggctatttgaatttcactgctgcttcttcgatgggcaatcctgccttgtagttctcgatgtatgtattaaaaccggctacgtcctcagcggtaggcgatacctcgataccggcgtctccgacaaatactttctcatccaaaaaatcagcaagcgattgttttttctcattgttcacgaggtaagaaccgagcagggcaataccccaagcacctccttcaccggctgtttccattacagaaataggcgagttgatggcagctgcgagtattctttgacctactccctttgttttgaataatccaccgtgacctgtgatcctgtccactttgattttctcttcattgaacaggatatcgttgccaatcttgagtactccgacggaagcgtataaatggcttctcatgaagtttgccagattgaacttgtcattggcagaacgtacaaacaagggccttccttctgcaagtcctgtgacgggctcacctgaaatataattgtaggagagtagacctccgcaatcggcatcacctgtgagagcaatgttatagagcttgctataaatttcgttcatgtctacaggtatacccagaagctcctggtattctttgaacaagttaacccatgcgttaagatcggatgtgcaattgttgcaatgtaccatagctaccaggcttccgtccggagtggtgaccatatcgatcatctcgtatggctttgacaactctttctccaatacaatcatggagaaagaggatgttcctgccgatacgtttcctgtacgttgtttcacagcattggttgcaaccataccggtacccgcgtctccttccggcggacataccggtattcctgccttcaaatgaccggatgcatcgagtttcttgcttccttcaggtgtaaggacacctgcactttcacctgccgacagtaccttgggcaggatatcttgcagtgtccaattgtactgattcggagcaatcagcttatcgaatttcgccaccatttcggctgaatagttgtgggtggtcgggtctatggggagcattccggatgcatcgcctatacccaatactttctcgcctgtcaactgccaatgcacataacctgccagagtagtcaggaagtcaatgtctttgacatgtgcttcgttgtctagaattgcctggtacaagtgagaaatactccatctcaacggaatgttgtagacaaacaggtctgataaagctgctgccgcgcgaccggtattcgtatttctccaggtacggaaaggtacgaggatttcttcttttgcattgaagggcatataaccatgcatcatggcactgacaccgatagctgccaggttctcgatctctatgccgtataagttcttcacgttggagcggagatcggcatagcaatcttgcagaccggaccagatggcttcgatgctgtatgtccaaagcccgtcaactagctggttctcccaagtatggtttccttgagcaatcggcttgttttcctgatcaatcaaaacggcttttatccgtgtagaaccgagttcgattccaagaatggctttgcctgtttcgattgttgattttgcatctgatttcatgttggatagtgtttagcaaagtgctttattcaacatataatatacttcattcatgcgcaactctttcttgaagcagctgatagtcgtatctttattgatatgtaccatttcgatacctgcgatttcagcataatcttcccagtattcagcggtcagatcatatgagaagcaagaatggtgagtaccacctgccagaatccatgcaccggcacctacttcaaagttaggcattggaatccaaagagcggaagcaaccggtaatttcggcagcggtttcggttcgatacattccacatcatttacaatcagacggaaacggttgcctaagtctactacagttgcagtacaacctgtaccgactttagaagtaaagacaagacgagctgtctggctcttacgaatacctataccgaggaagtgcacttccagacgaggtttgttggctgcgataagcggacaaacttccaacatatgtgattgtaagatagaactttgtgcaccgttgaagttcaatgtgtaatcttcgaggaaagaacagcctttcggaagtccttgattcattacccatacagtgcggtagagagcagcggatttccagtcgccttcggcgccgaaaccataaccttccgccatcagacgttgagaagcaagtcccggaatctggtcgaaaccgttatgttccaagtcgcccaagtcgtcaaaattggttgtgaatccttttgcgcctttcgctttcaagatagcgcgaagagccaattctgcttttgcggcgttccataccttctgataagcttcggttgatttgtcttccaaagaagcatcgtggtcgtattctttgaaataagtagctactaatgcgtctacgtcagcgtccttgatatctttgtgatattccatcagttcgcttaccggacaatagtctacatgataacccatacgttgttccgcttccaccttgtcaccgtcagttacggctacattgttcatctggtcgccaaaacgaatgatcagcatatcttgagaatctgcccaacctgcacaaacacgcatccatacagcaatcttatgcagtgtgtcttcgtctttccaataacctactaccactttgcgacggatacgcatacgagtacagatgtgtccgaattcacggtcgccatgagccgactgattcaggttcatgaagtccatgtccattgtatcccaaggaatttccttgttgaactgagtatgcagatgcaacaacggtttcttcaactgttgcaaaccgtgaatccacatttttgcaggagagaaagtatgcatccaagtgatgacaccgacacatttctcgtcgttgttggcagctttgaaaacagcttccacttctttggaagagttggcagttcctttgtataccacttttacagggagtttgccggagttgttcaacccgttaaccatttcattagagtgtgcgtctactgcgattactgcgtcacctccgtacaggagctgtgctcctgttacaaaccatacttcatattgatcaaatgcgttcataatgttttgctttaatttttaatttctagtttttaattgattattgtccataataagcattcggaccatgcttgcgactgaaatgtttttcaatcagcagaggattcattgttaaattgggattaacggcgtatgcgatacttgccatttttgctacctgttccattactacggcgttgtgtactgcatcgtgtgcgtcttttccccaggagaaaggaccgtgattctttaccagcacgcccggtgtatgtacaggattcaaaccttcaaaacgcttcacgatcacgttcccggtctccagttcgtaggcacctttcacttctgcttcggtcatatctgccgtgcaggggatagcgtcatggaaataatcggcatgagtagttccgatgttcggaatgtcgcatccggcttgcgcccaagcggtcgcataggtagagtgggtatgtaccactccgccgatttccgggaatgctttgtagagtactacgtgagtcggagtatctgaagatggcttcagccgtccttcaacgaccttgccatccagatccactactaccatatcttctgctttcatttcatcgtaacttacaccactgggtttgattactaccaatccgctttcacggtcgatggcagaaacgttcccccaagtaaagatgactaatccatgctttaccaattcgagattggcatgaaatactttttctttcagttcttccagcatattgattataatttgaatttcggatctttacgataaaccttgctattaaacttatataaggctgcccctcgtttggaacatagcttatctatcttatcggtcttttccacataatccattccggcaacacgcttgcggaagttgcgcttatccatcgtttcaccgtaaatggcttcatataaactctgcaatttggatagtgtgaaaagtttaggcaataagttgaaaccgataggttcggtagaagctttttgtctcatcaactcctttgcttttgtcaccattgcaggatgatcgaaaatcagtgggggaagttcattgatgtttacccagtaagcgttatgtttccgaactagtttccggtcatattcattgacgttgaccaacgcatagtatgcgacggagattacccgttctcccggatcacggtcgaccgctccgaaagttcccacttgttccatatacacattttccaatccggtaagttccgcaagtacacgtttggccgcatcgtccacactttcgttttcttgcacgaatcctcccatcaaagaccattcgcccattgcaggttcaaaatttcttttcagcagtagcagacttaattcaccatcgttaaatccaaaaatgatgcagtcaatgcctacatgaaagctaggattcgagctataataattgttcatcgtttttttatattagttaattaattgttaccagaaataccagtagaaagctgcggtaatagccaggataattgctgtatggataatatcccaatgattccaacttgcacgtgtagccgctttttgttctttcgtagccgtaccgaataccaagccttgaatcttttccgctgtcggagcttttgtagccaggctgactgcgattacgataatgatgcagaacaggaacatccatccgcagaagaacagccaattcatatcatagaacagatatttgaatgtagagtctgccacttctccggcattgctataatatactttagcacccagacgagttaagccgataaccataccggctatcaatccccacataccaccttgagcggaagtacgcttccagcagatacccaataagaaagcggctgcgatacccggagccaatacagactgaacatcctgcaaataagtataaagaacatcacctacactacgcatgataggaatccaaaggatacctaagattacaattacaactgttgcaatctggccgatacctactagtttcttttccggagtctccggtctgaaacgtttgtagaagtcaatagtaaacaacatggcggatgagttgaacaaagaagctaaagaactcatcaaagctgcaaggataccgcatacaaccagacctttcacaccggccggcaacaatttagcgaccaaagtggggaaagcggcatcggcatttgctgttccgttagccagtaacggaaggaatccttcaccaccggcaccgatatatttctgatgtaatgcaaatgcgatcatacccggaataagaaacaagaagacaggcagcagtttcaggtaagcaccgaagatggtaccgcgacgtgcttccatctcattctttccggaaagtacacgctgtacgataaactggtcagtacaccaataccagaatccgataatggcggaaccgatcaaagcacccagccaagggaagttcggatcatcgttactacggatcagattagtcattgtatctccgtaatcatttacagttaccgcaccgcaaactttcatcatttcgtcccagccacccaattctttaaaaccaagcacgaggatgatcaaggaaccaagcagaaggataggagtctggagtacagaagtatacaatacggatttcatacccccgaagatagtataaagtgctgtcagaactaccaatccgattgcagcaatccagaagaagtcgattccccaaagttctttgataccgaatacctgttggaataccaaaccaccggcatagactgttacagctacttttgtcaatacataacttactaaagaaataacagataagatcgtacgtgactgtgggttataacgtcgttccaagaattccggcattgtgtataccatgcttcgtgtatagaatggaacgaacacccatcccaaaatcagaatcatccatccttgaatttcccaatgagccatcgccataccactggaggctccggcacctgccagtcctatcaagtgttccgaaccgatgtttgatgcgaagatagaggctccgattgcgagccaagttgcgtcacgtccgcctaagaaataatctgccgagtcattttgtttttgtctgactacccaaacaataataccgatcagcgccaaaaaaaagacgccgattaccccccaatctaatgcttccacaataaatatgatttataagttaatattatttctctactgagaatttgaaaatacattcgctgttataggtttgtcccggttccagaactactgaaggccaatcaactttgttgggactgtccggataatgttgcgtttccagacatacggaagcacgttgattgtaaacgatccctttctttccggttacagtaccgtcgaggaagttacctgtataaacctggatacccggttcgttggtatatacttccagagtgataccgctttccggtgaagtcagtttggcagctacctgcgaaatgtctcccttagtgttcagtacccaattgtggtcataaccgtttccgtttttcaactggacaaaatcatagttactgatgtcttgccctactgttttcggagtcgtgaagtccatcggagtatcttttaccggggcaatttcacctgttgtcatgaaagtgctgtctaccggagtatagtagtctgcattcacatacagaatattgtcggttgaggctttcgacggactaccggccaggttgaaataagagtggttggtcatgttgatgatcgtctttttgtcggtagttgcgctatatttaatatcgatagcgttgtcttctgtcagtgtgtaagtgactttggctgttacattacctggaaaattttcatcaccgtcgggtgagatacgggttagttccaatgtcatcggatcaataagatttgcctcatatacttgatattgccatcccttgggacctccgtgcagacagtgcccgaaattgttttgtggtagctggatggtatcaccgtcaagaacaaaacgtccttgattgatacgattggcataacgtccgatggaagcaccgaagtcgctggggacattgatatagtcggcaatactatcgaagcctaaaactacatcctgcatctttccgtttttgtccggtaccatgatagacacgatacgacctccgaaattagtaatgcacacttccatgcctgctttattctttaaagtataaagattggtttgggtattatttacttctgtttgaaattttgccggatcaagacctgatagagtcagctcggaaaccggcttgttattgcacgcaaagagcataagtgcggcaaatcctgctagtagaaaatgttttttcatggttatattttttatgtaaatgagttgattatcttaattcgggtgtaaaagtaacactttgtttcggtgtgttcaatacactgatgtatgttatacaacataaaacgtaaaaaatgcacttattgttataccttattattatatataaaagggcggatataaaaaaaatatttttctgatgaaggaaaaatattcggttgcgaatgtatatcggtctatgtgttctctttgcatgagaaataagggcgttttttatgatatgtgttcgtatgtccacctgtgattagtgtaacggggcgtatttttgtaccatgattgatgaacaaatacactgatctccgatggggaaggaaattactatctggcacatcagggacgcctctctccgcagaatcagttgatggtgctgcatttacgccagttgtcctttactccggaaggttggctggtcgtttctcccgaaaggtatgcaggcacaccgtcacgccgtttcaccgaagccgatctggcaggggagtgggagatcatacgggtacaggagccgagatatgagcgtcagttggaagccggacagattcttcccgcttccatttattaaaagacggtacttgcaacggtgaaatggttgatgtggagggaaagtttgtccttgcaagcgggaagtggccttttttgaccgaaaactatctgttaatgcttgatttgggtacggagaagatagaaaatctgattatctttgcaggacacgactgggagaatgagacggaaaccattctctttaccggactcgatagtcggggacgttctgtctggggaaaaagaatagaataactatataattttttattgaaaaccatgagaagatacacaaatttattggctgtagtggccttatctgccggaatggcacttcatgcgcaaaccaatgaaatggtgatacagacaaagaaactgggagcggaaatccagcctaccatgtacggacttttttttgaggatatcaactatgcggccgacggtggcttgtacgccgaactggtgaagaaccgctcgtttgagtttccgcagaacctgatgggatggaaaacttacggtaaagtaactttgatggacgacggtccttttgaacggaatccgcattatgtgcgtctttccaatccgggacatgcccataaacataccggactggataacgaaggcttcttcggtatcggtgtccgaaaaggggaggagtatcgtttctctgtttgggcacgtctgtcgcaggggaacggaaaagaaacattgcggattgaattggtggataccaaatctatgggtgaacatcaggcgtttgccaccgctgatttgacagtcgattcgaaagaatggaagaagtaccagctgatcttgaagccgggtatgacccagccgaaatcgacacttcgtattttccttacttccaaaggaacagtggatctggagcatatctctctcttcccggtcgaaacgtggaaaggacatgaaaacggacttcgcaaggacttggcacaggctttggcagatatccatccgggagtcttccgttttcccggtggttgcattgtggaaggtactgatttgaatacccgttatgactggaagaaatcggtgggtccggtagaaaaccgacctttgaacgagaaccgttggcagtacacttttacccatcgtttctatccggattattatcagagttacggattgggattctatgaatacttcctgttatcggaagaaatgggtgccgaaccgcttcctattttgaattgcggtctttcctgccaataccagaataacgatccgaaagcgcacgttgccgtttgcgatctggacggttatattcaggatgcactcgatctgattgagttcgccaatggtgatgtgaactctacatggggaaaggtgcgcgccgatatgggacatcctgctcctttcaacctgaaatttatcggtatcggtaacgagcaatggggaaaagaatatccggaacgtcttgaaccgttcataaaggctattcgtaaggcttatccggatatgaagattgtaggtagttccggccctaattccgaaggaaaagaatttgattatctgtggcctgaaatgaaacgcttgaaagctgatttggtagacgagcatttctatcgccctgaaagttggttcttggctcaaggtgcgcgttatgataattacgaccgcaaaggtccgaaagtttttgccggtgaatatgcttgtcacggtaaaggtaagaaatggaatcatttccacgcagccttgctcgaggctgcctttatgaccggtttggaacgtaatgccgatattgtccatatggctacatacgctccgcttttcgctcatgtggaaggatggcaatggcgtccggacatgatctggttcgacaatctgaattccgtacgcactgtaagctactatgtgcaacagttgtttgcccataataaggggaccaatgttcttccgcttaccatgaacaagagaaatgtgacgggagctgaaggacagaacgggcttttcgccagtgcggtgtacgacaagaataagaatgagcttatcgtaaaagtagccaatacttccgatacggctcaaccggtttcgttgaaatttgaaggcttgaagaaacaaaacgtattatctgacggccgttgcatcaagcttcgctcacttgatttggacaaggataatacgcttgaacagccttttgccatcactccaaaggaaatacccgtgtctattcagggccacgtgtttactgccgagctggagccgaacacattcgctgtttataaatttacgaagaaataaaggataacatgattcgttttaataaagcaaggttggttggggttagattagttgttttatcatttgtgctggcagcctttaccgggctgtcggcgcagaatgatactacgtttgttgcgaatgaaaaccccattataaaatataagtatgtaggtgattccgctgctatggtacatgatgggaaagtgtatatttatgacggacacgatgagtgtccccctctcaatgagcattatttaatcaatgagtggtgtgtcttttcttctcccgacttgaagacatggacggagcatcccgttcctttgaaagcgaaagatttcagttgggcaaagggggaagcatgggcaagtcaggtcattgaacgggacggtaagttttactggtatgtgacggtggaacataagacgattcccggaaagtcaatcggtgtggctgtgtcggattcgcctgtctctgtgcttcaatctttaattatatgttgggttagcaacggatgaagcttggaatcaagttcatccacaattaacggataaccaaaatccaattggccgataactaaagccgctaagtcaaataatttattagttcctgatgactcatgtcctttcatcgaaaaacggttttctccgataatttctccttcatcattgtataaatgattttggtatataaaagggcgactctccattacggaaagccgccctacataattatctgatacaaccggatggtcttttattccaatctgcgagaaccgtcaccgattactacatcgtacactttcgggcttctgccgaatttagctttgaacgcagctttggtcttttcaacgaagttgtcatacaattcgttcttgacaaggttgattgtacaaccaccgaaaccgccacccataacgcgtgaaccggttacaccgtattctttagcgcagtcgttcaggaagtcgagttcttcgcagcttacttcgtacagcttgctcatgccgtgatgagtttcgtacatcttcttacctacagtttcgtaatcatctttttccaaagcatcgcaaacgtccaatacacgttggatttcttcgattacgtattctgcacgcatatagtcttcggcactgatttcagctttagcctcttccaacatctccatcgtacagtcacgcaggaattctacgtgcggatgtttcttctggatagcggcaacggcagcttcacaactttggcggcgcttgttgtaagcggaagaagccaattcgtgcttgacaactgaatccatcaacaccagacggtaaccttccggatggaacgggaaatactgatattccaatgaacggcaatccagacggatcaagctgccggctttaccgaatacggaagcgaattggtccatgataccgcagttcacgccacaataattatgctctgtagcctgaccgaccttagccagttcaaatttatctatcttgttgtcaccgaacaattcgttcaatgcgaaagcgtatgtactttccaaagcagccgaagaagacatacctgcacccaggggcacatcacctgcgaaagccgtattgaatccttttacgtcaacgccacgtttgatcatttcacggcaaacaccgaaaatatatcttgcccaacttgcacggggagcatcttcctcgttcaagccgaattctacataatctttcaagtcgatagagtacgctcttactttgtcagtaccgttcggtttgatttctgcaatcatacctttgtctactgcacccggaaaaacgaatccgccattgtagtcggtatgctcaccgatcaggttgatacggcccggagaagcatataaaaaaccagtagttccgtcaaagtgtttgataaagcgacttcttacatattctgtatccatgatattgatattttaaagatgaataaattggtatattattattccacaggaatatctttgtttacattcttgcaacctaccagaccgtagaacagcagataagcaagagcagcgataataacccagtagctcggcatgaaacctgcgatatcggcaactataccctgaatgacaggaaggataccgccaccacaaaccaataccatgaataagccggaagctgcagcaagatatttgcccagtccttctactgcaaggttaaagataccgccccacataatggaagtacacagtccgactaaaactagatacatggcgttaataggtacttcggcaaatccgaaagacaaaccacccgtttcgctttgttgaagtacaggaagattcactaatgtctcagtagatgagaagatagcaaggattaccaagatcaagcctaagccggaagtaaatgtaagcatagctttactggagactttggcacctagtgaagcaccggccagacgtccgaccaacattaagaaccaataagttcctactacgaatcctgagattgtagacgctatacctgctccacctttttctacagaatctgtcaagaacaaattcaaagtacccggcacacccacttcaatacctacatatacaaagattgcaatagctcctaagatgaaatggcggaatttcaaagcgcctttcatcaattttccaataggttctgttgaagtagcggcattgggttccggtatatgtacgaacaggagaacaaagaatgcaaaagcaaatacagccattgcggtatacatcacagggaatatctgagagatagtcgctttttcgatagaaccggcgataaggatacctacaaacatcggagtaatggtagccattacagagttgaaagatccaccgacctgaataagttgatttcctttgttgccttcacctccaagtttgttcaacatcgggtttacgaccgtgttaagcagacacatggagaaacctgcaacgaatgcaccgatcagataaacggcaaaagccatttccgggcttgaatgaccggataagaattgaatacctacgcctatgaaaccgatagccactgcgataagtgctgttttcttatatcccacacgttgcagcagtataccgcttggaatacccattactgcataagcaatgaagtttccgaagtttcccagcatgcctaatgcgtttgatacgtcgaactgattttttagcacgatacccataggggcagcaaggttagtaacaaatgaaatcataccgaaaaggaaaatcatcgtaatgattgcaatgattttaccgttctttttttcttgtgtcatggttcaaaaaaaatgttagtttataaattaggttagttatttttaattgttattcttctacggaaaatttgtaaatagtgatttgttggtactcatcgcccggtagcaaggtagccgatggaaaatgaggtttgttcggagtatccgggaaacattgagcttcaaagcagatagcgcttcttgcagggaaggtagcaccgtgtgcgcctttgaatccgttgagccagtttccggtataaagctgtacaccggcttccgttgtatatacttccatgagacgtccgcttttcggatccttgcaggtcgcggccaactcaagcgaaccgctctctgtcttgttcaatacgtagcaatggtcatatcctgcgccgaataccaattgctggaacttatcatcgatacgttcgcctacggtgtgcggagtacggaaatccatcggtgtaccttctactttggctatttctccggtagggatggaaacttcgtcaataggtgtatagaaatcagcgttgatagtaacgatatggtcgttgacagtaggagtgggagcggctatgccggcaagattgaagaaaccgtgattggtcagattgactactgtagctttgtccgttgtagcacgatattcaatattcagagcattcacctcgtcatccaggcggtaagtcatttctacttccagattaccggggaacccctcttcgccgtcggcggaaacataattgaattgcactgtgccttcatcaatctgaacagcgtcccatacgcgggcgtggaaaccggtaggtcctccatgcagggagttcggtccgttgttgatggtgagttcatgttcttcgccgaacaaggtgaattttcctttggcaatgcggttgccgtaacgtccgatagtcgtactcaggaaaggttcgggactgttgattacatggtcgatactgtcgtgtccgagaatcacgttggcatacttaccgtttttatccggtaccataatagaaagaatggcgcatccgtaatttgttacagctacttccattcccttcttgtttttgaggataaataaatcagtctctttattgtttatctccttttggaaatctttccggctgagccctgatagattcccttctgttgggaatgtgttattcatgtctggtattattaaaatttcctgcaaataaaaggaaattctttcttactcacaaatattcctattaaatatagtctaaaatttgaactatttttcgtatgtttgttcccggattgaaacaatccgagcgaatttaatctaagtttataacaagaaaaacaaaaatgtatccattaaaattcgaacccattctgaagcagacgctttgggggggcgacaaaattattccgttcaagcatctgaacgctgacttgaagggagtaggagaaagctgggagatttccggcgttgaagacaatgagtccgttgtggcgaatggcccggacaaaggtttaaccttgggtgatatggtaagaaggtatcgcgaggaattggtgggagaagcgaactatgctcgtttcggaaacaaatttccgttgctcatcaagtttatcgatgctaaacaggatttgtccatccaggtacacccgacagacgaactggcgaagaaacgccataattcaatgggtaagacagaaatgtggtatgtggtagatgccgacaaaggagcaaagttgcgttcgggattttccgaacagattactccgaaagaatataaagaacgtgtgttgaacaatacgatcactgacgtattgcaggaatacgagattcatccgggtgatgtgttctttcttcctgccggacgtgtgcacagtatcggggcaggttcattcatcgccgagattcagcagacttccgacatcacttaccgtatctacgacttcaaccgtaaagatgcgaatggtaaaacccgtgagcttcacactgatttagcccgtgaagccatcaactatgaggtattggatgattatcgcacgaagtacgaacctttgaaggatgaaccggtggaattggtggcttgtccttacttcactacttctttgtatgacatgactgaagaaatcagttgcgattattcggaactcgactcattcgtgatctttatctgtatggagggagcatgtgtgatgaaagataatgaaggtaatgaactgacggtcaatgcgggagaatcgatcttgctgcctgctacgacgcaggatgtcactattactcccgtaggaggtaatgtgaaactgttggaaacgtacgtataattaatacttaatcgccataatttagtcatccgactttgttctgttatgataatgggcaaagccgggtgactttttatctctaaagagataactttgcaaaaaataaaggaacaaatgacagaggattattcacatagaaaaaaagaggaagcctgtacaaaggagcagctaaagaacaggcaggtgcttattattctagtatgttctatacaaaagagatacctgattatgtgaaagaagatatccgtattggattaaaatagtataagagaggagaatatcgtagtatttcttcttttatgaataagtatgagaaatgagtcagtataatctcattatatttcctagagcggaggaacgcattgattcggtaattgattttttattaatagagtggggatttcagtcacagcaaaaatttatggcagagttaaaatattgttttaaaattatagaaataaatcctttttgatatattgctttagagtactatgtttagatgatttcttcattcagaagaaaataattgtggcttaggctgtgtgttttcaggtttacttattatcgtttgtagtgaagatgctattaattgtattttaatatgcaaaaagaggaaatattacgattgatcaaagaaacaatagctaagacaataccatctggcgctaaagttattttattcggatcacaagctcgtggagatgcgagggaggatttggatggggaatattcttattttactgaataaagataaagttggattagatgaccatgattatatttcttatcctttttggaacttggatggactattgacatacaaattcatcccattctttatacttttaaggactggatggaaaggagtttttcatcattttacaagaatgtggaacgagagggggtgatttatgttaagtgcagaagaagaaattcttccgcttattgataagactgtaatgtttatttctaaaatggaggatttgttgacttttaagtaggatatagtgaagtcccttattttatctcatattcctgaagtatgcacgtatcttcctcataatcttgattcccattaccaccccatcgaatatcgccatgcctgtattgaacgaacgcataatggcatccgctttgttggtagccggagctagcggagcgaatatctcgcgtgttgtggcagtcatggctttcttttgaacatgaatctcatttagaagtttctttttacgttctgcgatttcttctaaagtaattttctgtgctggtgtttgtgcactcataatttatttatttggatcggttaaaaataaattagcgaggaagttcaccatcggagagatgatgagctgcttgcggaaaataataactaggaagattaggacaatgttgataccggcaataatggcaaaactagccatgagaccaccgagcaatggctctaatatgtaagccaatgcaaaaagcaggtaaaacagggctaccatgcctaagataataagtactaatatcatgattaacgttgagaatagtatggttaacttttccgttaattctaatttggtatattctttctgaagttctaaatatttcttgaactcgaaaaataactgctggaaattttcaatacttttatcgtctgcaaacatggtcgctctgttttagtctgttgttactcatttactctgctatttctcctttcatctcagctgcaatctcgtcaacaagattttccatctcattacggttgagcttgatacctttcttacggagaatctctgcaattttatgacgagtatcttctcccttctcaggagcaaataaaataccaagggctgcgcctacggctgcaccacccagaaaagctgctaatacattcaatcctttcataatttgtaatgtttaaaatgattatgatacaacaaatataacatttttattgaaaggttgttcatgaaaacgaaaaaaaagtgctcagttttatatttattttttttcttcttcggttttaatcttatttaactgactttcgaggctaatcaatataacttaaggcgtacttttgctaactaatattgtaaatcgaaacataatggaagctaaaattgtttttattaccggtgccagtagcggaattggtgaaggttgtgcccgtaagtttgcaaaagagggatggaacttgattttgaatgcgcgtaccgtgtcgaagttggaggaactgaaggctgaattggaaaagatgtatggtgtgcgggtatatatacttccttttgatgtacgtgaccggaagcaggctgctgcagctttggaatctttgcccgaagaatggaaagcgattgatgtgctggtcaacaatgccggactggtgattggtgtagataaggagtttgaggggagtttggatgagtgggacatcatgatcgatacgaatataagagggttgctggctatgacacgcatggtagtacccggtatggtggaacgcggacgcggacatgttatcaatatcggttccattgccggtgatgccgcttatcccggaggaagcgtgtattgtgcgactaaagctgctgtaaaagctctgtcggacggtttgcggattgacttggtggatacaccattgagagtaacgaatattaagccgggtatggtggaaacaaattttacggtagtacgttatcgtggagataaagaggctgctgataatttttacaaagggattcgtccgttgacgggagatgatattgccgagactgtctattttgccgcatcggctcccgagcatattcagattgcggaagtgcttttaatgcctacttatcaggctacgggtactatttcgtacaagaaaaagacggaatagaggtttttttgccggatttctttgccggatgataaaatttctattattttgttgcccgaaactaaatgtagatggacaaggatatagaattattaattaaaacatgagtataggattatgaaaaaattagtcgtattgggaatgggagtatgcttggtgctggcttttgcatcttgtaaatccagcgaaagcgcctataagaaagcttacgagaaagcaaaacagcaggaactggcggaaccgcaggtggaagctccggtagaagtgactccggtagtggcagctcctgtggcaacacctaaagtggcagatacatccggcgttcgccaggaaaaagttacagtggtttccggcaatgagggattgaaagattatagtgtagtggcaggtagttttggcgttaaagcaaatgcggaaggtctgaaagattggttggacgcacaaggttatcagtcaactattgcgttcaatgcagataaggcgatgtatcgtgttatcgtaagttcatttgccgataaagctgcagcagctgaagcccgtgatgcttttaaagctaagtatccgaaccgttcggatttccagggagcctggttgctgtatcgtgtttattgatttctttttggtaatatatacttggaaagaacaaatgttgtttccaaataagaaggcggtaactgggaagttactgcttttttattgaagaaagggttgaatatctatttagatatttttatctttctactaaaagaagttataaatgccagtggggaaacttttatagcaaagaaagtttttacttttgtcaattcttaatttggagaattcaaagccttgatggaaatgaggttttaataaaagaattaaatggaacaaaaatatgtaatggctgctattgatgcagcattgaaagcaagtgaagaaatactgtctatttatgaggatccggcatcggattttgaaatagaaagaaaggctgataattctccactgacaatagcggacagaaaagcacatgaagcaattgttgccgttttgagcaagactcctttcccgatccttagtgaagaagggagacatctggattatgaggtccgccgtaaatgggatacgttatggattgtggatcctttggatggtacaaaggaatttatcaagcgtaatggagaatttactgtaaatattgctttggtgcaagactcggtgcctgtgataggggttatttatgtgcctgtaaagagaatactctattttgcggttgagggtgtgggagcatataagtgctccggtcttgtcggtctggaagatgatacggtgacattgaaacagatgatcgaagattcggaacggttgcctttggatgatcctcgcgatcatttcatagtcgttgcttcccgttcgcacttgtcgcctgaaacggaagaatatattgcagacctgaggaaaaagaaacgcggtggcattgagttgatatcgcgtggaagttctatgaagatctgtctggtggcggaaggagaggctgacgtgtatccgcgctttgctccgactatggagtgggatacggctgccggacatgcgattgcacgtgctgccggaatggaagtgtatcaagccggaaaggatgaaccgttacgatataataaggaggacttattgaatccttggtttattgttgagcccaagagagaacactaattgatgtttatatgacatttgaaattgtatttgtactattggccctattaggaatggtagctgccttggttgcagataagatgcgtccgggtatgatacttttttcagtagtggtattatttttgtgtgccggtattctgactcccaaagagatgcttgaaggctttagcaacaaaggtatgataactgttgctttgctatttctggtgagtgaagggatccgacagtcgggtacgctgggacaggtgataaagaagctgttgcctcaggggaagacaacggtgtttaaggcacagttgcgtcttttaccttcggtggcgttcatctccgctttcttgaataatactcctgtcgtggttatctttgctcctataatcaagcattgggccaattcggtgaagcttcctgctacaaaattcttgatacctctttcttatgtcactattctgggtggtatttgtacgctgatcggtacctctactaatctggtggtgcatggtatgatattggatgccgggttcgaaggcttctcgatgtttgaacttggaaaggtaggaatctttatagccattgccggtattatttatctgtttgttttttcgaagcgtctgttgccggatgcacgtccggatacggcggtgccggatgaggaagtagaggaaggggagaagctgcaccgggtagaggctgtattgggtgcgcgttttcccggtattaataagaaactgaaggattttaatttccaacgccattatggggcggaagtgaaggagataaagacacgtaacgggcaacgttttgttacgaatctggaagatatagtgcttcatgaaggagatactcttgtggtgatggctgatgatacgtttattccgacatggggagaatcttccgtattcgtgctgttgacaaatggaagtgaccctgatactgccggaaagaaaaaacgttggtttgctttgtttcttttggtgttgatgattgtaggtgcaacagtgggtgaacttcctattgtgagggaaatgtttccggatatcaaactggatatgttcttctttgtttctattactactattattatggcatggacaaatctgtttcctgcccgcaaatatactaaatacatttcgtgggatatcctgattacgattgcttgtgcttttgcgatcagtaaggcgatggtaaattcgggagtggcggattgcgttgctaagttcatcattgggttaagtgatgattacggtccgcacgtgttgcttgcaatgctatttattattacaaatctgtttacggagttgataaccaataatgcagcggcggctttggcgtttcccttggcactgtcgatctcgacacagatgggagtcagcccgacacctttctttgtggtgatttgtatggctgcatctgccagtttctctacaccgattggttatcagacgaatctgattgtgcaaggtatcggtaactataagtttatggattttgtgcgtatcggattaccgctaaatattataaccttcttaatttctgttattctgatcccgatgatctggaacttttaataaaactaatttatagatggaagaaaagaatcatatatatcctatatttgaccgcatgatgacacggcaagacaaagaagaacttttgggacagcatagtgtcatgatatggtttaccggactgagcgggtcggggaaaagtacagttgccattgcattggaacgcgaactgcataagcgtggactgctttgccgtattctggacggggataatatccgtagcggaattaataataatttgggcttttcggaaaccgaccgggtggagaacattcgccgtatagccgaagtgtcaaagttgtttttggacagcggcattataacaattgctgcttttatcagtccgaataatgatattcgcgaaatggcagcgaatataatcggaaaggatgattttctggaaattttcgtaagtaccccgttggaggagtgtgagagacgcgatgtaaagggcttgtatgcgaaagcccgcaaaggagaaataaagaattttacgggaatctccgcgccttttgagataccggaacatccggctttgtcgttggatacttctaaactaagtttggaagaatctgtgaatcgtttgctggagctgattttacctaaagtgaagaatgtgaaatgaagaattaggaatgaagaattggtatgcggttgtcggcaaattcataattcgtaattcataacttttaaaataaatggaagaatataaattgagtcacttgaaagagctcgaagcagagtctattcatatcattcgcgaggtggcggcggaatttgagaatccggtgatgctttacagtatcggaaaagattcttcggtgatggtacgtttggcggaaaaagcgttttatccgggtaaagtaccattccctttgatgcatatcgattcgaaatggaagttcaaggagatgattcagttccgtgacgaatatgcaaagaaatatggatggaatctgattgtagaaagtaatatggaagctttcaatgcaggggtgggaccttttacgcatggaagcaaagtacacactgatctgatgaagacacaggcattgcttcgtgctctggataagtataagtttgatgcagcgtttgggggagcccgtcgtgatgaagagaaatcacgtgcgaaagaacgtattttctctttccgggataagttccatcagtgggatccgaaaaaccagcgccctgaattgtgggatatttataatgcccgtgtacacaagggggaaagtattcgcgtatttccgttgagtaactggacagagttggatatctggcagtacattcggctggagaatattccgattgtcccgttgtattatgcaaaggaacgtccggtagtacaaatggatggtaatctgattatggcggatgatgaccgcttgccggaaaaataccgtgatcagattgaaatgaagatggtccgtttccgtacactgggttgttggccattgacgggtgctgtagaaagcggagcttcaacaattgaggagattgtggaagaaatgatgactactactaagagtgagcggacaactcgcgtgattgacttcgaccaggatgcgagtatggagcagaagaaacgtgaaggatacttttaattgtaacaagtgatggcagataataaattagatataaaggcttttctggataaggatgagcagaaagacttgctgagactgttgaccgccggttcggttgatgatgggaaatcaacgctgatcggacgtttgttgtttgacagtaagaaattgtacgaagaccagttggatgcgttggagcgtgatagcaaacgtgtaggaaatgcgggtgagcatatagactacgcattgttgctcgatggtttgaaagccgaacgggaacagggtattacgattgatgtggcttatcgttatttttctaccaacggccgtaagtttattattgcggatactccgggacatgagcagtatactcgtaatatgatcaccggcggatctacggctaacttagctattattctggtagacgcccgtatgggagtgattacacagacacgccgccatactttcctggtatctctgttgggtatcaagcatgtcgtattggccgtaaacaagatggacttggtggacttctcggaagaacggttcaacgagattgttgccgaatacaagaaattcgttgctccgttgggaattcctgatgtgaactgtattcctctttccgctttggatggagataatgtagtggataaatcggaacgtactccgtggtataaaggaatctctttgttggattttctggaaaccgttcatattgataatgaccataatctgtctgatttccgtttcccggttcaatatgtacttcgcccgaatctggactttagaggtttctgcggtaaggtcgcatccggtattgtccgtaagggggatacagtgatggcacttccttcgggaaaaacgtctaaggtaaaaagtatcgtaacttatgacggggagttggattatgcgtttccaccgcaatctgttacattgactttggaagatgagattgatgtgtctcgtggtgaaatgctggtacatccggataacttgcctattatcgaccgtaattttgaggcaatgatggtgtggatggacgaggaaccgatggatatcaataagtctttctttatcaagcaaacgactaatctgagccgtacccgtattgatgcgattaaatataaggtggatgtaaacacaatggaacacctttctgttgataatggacaattgacggcagatagtttgccattgcagctcaatcagattgcacgtgtggtgctgactactgccaaagaacttttctttgatccgtataagaagaataagtcatgcggttcatttatcttgattgatcctattacgaataatacttcggctgtcggtatgattatcgatcgggttgaggtgaaggatatgagcaatacggatgatattcctgttttggacttaccgaagttgggaattgctccggaacattatgaagctgtggagaaagcagcaaaggaattggaacgtcagggttttgctgtgaaaataataaagtaagaaaagtatgggattactcgaatttaataaacttccgattaatacgctggtaggtgcagattggaaaacgtttaaggctatcactgccggtcgtgaaatagatgcggcttacaaaggaaaataccggttgacaaaggcggtgtgccgtttactctctccattagccggattgcagaatagccggtatgaaaagctattggccaaccagccattggaacatgatccggtatttattctgggacattggagaagcggaactacttttgttcataatgtgttctcttgcgacaagcattttgggtataatacaacgtatcagactgtgtttcctcatttgatgatgtggggacagcctttctttaaaaagaatatgagttggctgatgccggataaacgtccgaccgacaatatggaactggctgtggatcttccgcaggaagaggaatttgcattgtcgaatatgatgccttatacttattataatttttggtttttaccgaaatgtcaacaggaatatgcagacaagtatctgttgtttgatgatattacagacgcggagttgaaagtttttgaagaggtatttacgaaactgattaagatttctttgtggaatacgcatggtactcaattccttagcaagaatcctccgcacaccggtcgggtgaaagaactggtaaagatgttcccgaacgctaagtttatttacttgatgcgtaatccgtatacggtattcgaatctacacgcagtttctttacaaatacgattcaaccgttgaagttgcaggatatcagcaatgaacaattggaggaaaatatcctttctatttatgcaaaactttatcataagtatgaatcggataaacagtttatccccgaaggtaatctgatggaggtgaagtttgaagattttgaagcagatgcgatgggaatgacagagaatatttataagtcactttctattccgggattcacggaagcgcgtgctgacatagaaaagtatgtgggcggtaagaaaggatataaaaagaacaagtataaatatgatgatcgcacaattcgtctggttgaagagaattggggatttgctttaaagcaatgggagtataatttataagaagaagaagaaaaaagaaaggaaagtaatggttcagaaaattgttcgtcgcctgttgatgacaggttttgttgcatttttttcttccttgtctttgatggcgcagcataaagtcgaaatggttccttttggagacatggatcaatgggtagaccgtcaaataaaggagtcgagcattattggcggaaatacaaagaatgtatatgcgatagggccgaccactgtaatcaagggagatcaggtttataaaaatatgggtggttcgccttggggtacttcaaacgtgatggcaaaagtagccggaattaccaagacgaacacatcggttttccccgaaaaaagagggaatggatactgtgcgcggctggatactcgcatggaaagtgtgaaggtgttgggactggtcaatatcacggtgctggcggctggttctatttttaccggatcggtgcatgaacctattaaaggtactaagaatccacagaagatgctgcagaccggtattccgtttactaagaaaccggtagcccttcagttcgattacaaggtgaagatgtcggatcgcgaaaatcgtatccgtgctaccggattcagtaagattacggatgttcccggtaaagattatcctgcagctattctgtttttacagaaacgttgggaagatgcggaaggaaacgtgtatgcgaaacgtatcggtacaatggtgacctattattatcactctacggattggaagaataatgtttcctatgaaattatgtatggtgatattacaagtcgtcctgaatataaggctcacatgatgcgtctgcaggttactgaaagttacacggtcaatagtaaaggcgaaagtgtacctattcatgaggtggcttggggggatgaaaatgacgttcctacccatctgtgtcttcagtttacatccagtcacggaggggcatatataggttctccgggaaatacattatggattgataatgtaaagttagtatattaaaggtacagcagaaaaataagaatagccaatgataaatttgtcgttggctatttttgttttataaaaaaaagaatggaggtgtgattttttacgtgattttttgcgtgtattatattaaatatctatatttgcagtaatttttaagaaaataagttcatcttattctctttttgatggaaatatattatttactaaaataaattgagatgaaaaagggtttattatttattttattggcggcagtttctgtttgtctgcctgctcaggaaaaagaaaaagcagcaaccagctatagcgtagagacaaaccgctttggagctaattggtttattagtggtggtctgggagcccagatgtattttggagataatgacggtaagttggattttggaaaacgacttgctcctgcattggacattgctgtaggaaagtggtttactcccggaatcggtttgcgtattgcttataatggtcttcaggctaagggagctactttgcttgaagatgatgcttacgtaaaaggtggcgttatgtctaacggatattataagcagaaatggaatatcgctaatttccatgctgatgttatgttgaaccttactaatatgttctgcgggtataaggaagaccgtctgtattcattcatcccttatgcaggtgcaggatgggttcattcttggacgaaaccgacagatgataatattggttttaatttaggtttgattaaccgtttccgtttgtcgtctgctttggacttcaacgtggaaatgcgtagcctgtttatgaaaaatacattggctggtgagaataaggaagctatgttaggactgactgtaggtgttacttataaatttaagaaacgcggttggaatgcagttcctacggttccgatggttccggaaagccagttgaacgatatgagagacagagtaaacgcactgaagggtgaaaatgaatctttgaagcgtgacctggttgaagcacgtaataagaaaccggaagtgattgttaagaaagaagccggattggttccacgtcttgttgttgtattcaatatcggtaagagcaatatcagcaagagagagtacatgaatatcgaagctatggctaagggtatcaaggaaaatccaggaaaagtatttactataactggatatgctgataagggtacaggctctgctgaatataacatgaagttgagtaagaagagagctgaagctgttcgtgacttgatggttaacgaatttggagttcctgcttctcagttgaaggttgattataagggtggtgttggcaacatgttctatgatgatgctaaactgagtcgtgtagcaattgttgaagaataatatacacttgaaatattataataaaagagacgtttcctttcacgggaagcgtcttttttgtatttttgtgccccatgagcagaatagtagcaatagattacggaagaaaacgtacaggaatagctgtcagcgacaccatgcagctgattgccaatggcttgacgacagttcctacacatgagcttttgaattttatcggtgattacatcgctaaggaaccggtagagcggattattattggattgcctaagcaaatgaataatgaagtttcggagaatatgaaaaatatagaaccttttgtccgttcactgaaaaaacgttttcctgagcttcctgtggagtatgtggatgagcgttttacctccgttcttgcgcatcggactatgctggaggcaggactgaaaaagaaagaccggcagaacaaggctttggtagatgagattagcgctacaattattctgcaaacatatttggaaagtaaacgtttttaatatagacaaagaataacttaattttttagtagaatatcagatatgattttacctatttatgtatatggccagcctgttttaagaaaggtggcagaggatataactccggattatccgaatctgaaagagttgattgcaaatatgtttgaaacaatggtgcatgcggatggtgtaggattggctgctccgcaaatcggtttgccaattcgtgttgttaccattacattagatccgctctcggaggattatcctgaatttaaagattttaataaagcttatatcaatccccatatactagaggtcgggggagaagaagtaagtatggaagaaggatgtctgagtctgccgggtattcatgagacggtgaaaagaggagataagattcgcgtgaaatatatggacgagaattttgtggaacacgaggaagttgtagaaggctatttggctcgcgtaatgcaacatgaattcgaccatttggacggtaagatgtttattgatcatatttctccacttcgtaagcaaatgattaagggaaaactgaatacgatgttgaaggggaaagctcgcagttcttataagatgaaacaggtaaaataaagataaaaaacgtttatatccctgttaagtaaacgaaaaacattatttttgcttcgtttacaagtataaaatgtcgatgataaagagaatattaacagtattattactgttccccacactggtatgtgctcagataaatacggatcgggtgatgactattgcccgaaacgctctttattttgaggattatgtactttccattcagtacttcaaccaggtaattaacgctaaaccttatttgtatgagccttattttttcagggctttggccaaactgaatctggaagattttcaaggtgcggaagcagactgtgatgcggctatccaacgcaatccgtttgtggtaggtgcttatcagattcgtggccttgccagaatccgtcagagcaaatttgacggggctattgaagattatcagaaggctttgcattatgatccggagaatatcactctgtggcataatttaacgttatctcatattcagaaaaaggattataattcagcaaaagaggatctggaaagtttgctgaaagtgtctccccgttatacacgtgcttatttaatgaggggggaagtgtctttgcagcagaaggacaccattgctgccttgaccgatttcaataaggcgcttgaattggataaatatgatccggacgcatgggctgcacgggcaattgtgaaattgcagcaatccaaatatgcggaggcggaatcggattttgaccgggctattcatttaagtgcgaagaatgccggaaactatattaatcgtgcattggcaagattccatcagaataatctgaggggggctatgagtgactatgatttggcattggatattgatcccaataactttatcggacattataatcgtggtctgcttcgtgcacgggtaggggatgacaaccgggcaattgaggactttgattttgtcattcaaatggaaccggataatatgatggctgtctttaaccgtggtttactccgtgcgcagacaggtgattatcgtggggccatacaagactatacgactgttatcaatcagtatcctaactttctggccggatattatcagcgttcggaagcccgtagaaaaattggggataagaaaggagcggaacaagatgagtttaaggtcatgaaagcccagattgacaagcagaacggtgtgactaataaggatgttgcccagaataaagataaagcggacggaagtggagatgaagatggagaaaaaacacgcaagaagtcggataagaatatgaataactatcgtaagatagtaattgccgatgactctgaagccgaacagcgttatacgagtgattatcgtggacgtgtgcaggacaagaatgtaaatatcacactggagcccatgtttgctttgacttattatgagaaaatgagtgacgtgaaacgttcggtgaattttcacaagtatattgaggacttgaaccgtacgggaatcctctctaaacgtcttcgtattacgaatatggaagctccgttgacagaagaacaggtgaaattccattttgctttgatcgatacacatacgtccgctatcgtggctgatgaaaagagcgcttcgaagcgttttgcccgtgcgattgacttctatctggtgcaggacttctcaagtgctgtggctgacttgacacagacgattctgttggacggtgatttcttcccggcttattttatgcgtgcgcttatccgctgtaagcaactggaatatcagaaggcggaacaagccgccgaaacgaatattccgggtgataaacgtaaagagattactgcggttgattatgaagtagtaaggaaagacctggacaaggtgatcaatctggcgccggactttgtttatgcttactataaccgtgcgaatgtctctgctatgctgaaggactaccgggctgctattgccgattatgacaaggcgatcgagctgaatcctgattttgcggatgcttactttaatagaggccttacccatatatttttaggtaataacaagctgggcatttctgatttaagtaaagccggtgagttgggcattgtttctgcttataacgtgatcaaacgttttacggatcagacggaataacatttatttgataaaaaatggaaaactcaaaagatttacttacttttgcgttcaaattgtgaaaatataacatcatctattatgataaagataaaatttcccgatggctctgttcgtgaatataatgaaggagtgaacggtttacagattgcagaaagtatcagttcgcgtttggcacaagatgttttggcttgtggcgtgaatggcgagacttatgatttaggacgtcctattaatgaagatgctgatttcgtgctttataaatgggatgatgaagaaggcaaacatgctttttggcatacaagtgctcacttgctggctgaagctttgcaggaactttatccgggcattcagttcggtatcggtccggccattgaaaacggattctattatgatgtagatccgggagaagcggtaatcaaggaaagtgatctgcctgctattgaagctaagatgcaggaactggctgccaagaaagaagatgtagtcagagagagcattgccaaagcggatgcattgaagatgtttggcgatcgtggggaaacttataaatgtgagttgatttccgaattggaagacggacatattactacttatacgcaaggggcatttactgatctttgccgtggtcctcacttgatgacgactgctccgatcaaagctatcaaactgactacggtagccggtgcatattggcgtggtcaggaagaccgtaagatgttgacacgtatttatggtatcacgttcccgaagaagaaaatgctggatgagtatctggtattgttggaagaagccaaaaaacgtgaccaccgtaagatcggcaaagagatgcagttgttcatgttctcggagacggtaggaaagggacttccgatgtggctgccgaaaggtactgcattacgtctgcgtttgcaggaattcttgcgtcgtatccagactcgctatgactatcaggaagtaatcaccccgccgattggcaacaagttactatatgtgacttccggtcactatgcaaaatatggcaaagacgctttccaacctattcatactccggaagaaggagaagagtacttcttgaaaccgatgaactgccctcaccattgtgagatttataagaacttcccgcgttcatataaagaccttccattgcgtattgctgaatttggaacagtttgtcgttatgaacaaagtggtgagttgcacggtttaactcgtgtacgtagctttacgcaggatgacgctcatattttctgccgtccggatcaggtaaaagatgaattccttcgtgtaatggatatcatctctattgtgttccgttctatgaatttccagaattttgaggctcagatatcattgcgcgataaagtaaaccgcgaaaaatatattggtagcgatgataattgggaaaaggcagaacaggctattatcgaggcgtgtgaagaaaaaggattacctgctaagattgaatatggtgaagcggctttctacggtcctaagctcgactttatggtgaaagatgcaatcggtcgtcgctggcagttgggtactattcaggtagactataacttgccggaacgttttgaactggaatatatgggatctgataatcagaaacaccgtccggttatgatccatcgtgcaccgttcggatcaatggagcgctttgttgccgtgctgattgaacataccgccggtaagtttccattgtggttgacacccgaccaggttgctattctgccgatcagtgagaagttcaatgaatatgcggaacaagtgaagatgtatctgaaaactcacgaaatccgtgcgattgtagatgaccgtaacgaaaaaataggtcgcaagatccgtgataatgagatgaaacgtattccttatatgttgattgtcggcgaaaaagaagcagaaaatggtgaagtttctgttcgtagacaaggcgaaggagataaggggaccatgaaatttgaagaatttgctaaaattttgaacgaagaagttcagaatatgataaataaatggtaactttgcagccgtttcatgataaatatttagtagaacaataaaaagatcaaactaggaagtaaacgtttttaatgaagaatgacacttttaaagggcaatacagaatcaacgaacagattcgtgccaaagaagtccgcattgtaggcgacgatattgaaccgaaagtatatcctatctttcaagccttgaaaatggccgaagagaaagaattggatttagtggaaatttctcctaatgctcaaccccctgtttgtcgtattattgattactctaaatttctttatcaattaaagaaacgccagaaggaacaaaaagcgaagcaggttaaggtcaatgtaaaagagatccgtttcggacctcagacagacgatcatgattacaacttcaagttgaagcatgctaagggctttttggaagatggagataaggtgaaggcctatgtgttctttaagggacgttccatcctttttaaggagcaaggtgaagttcttttgcttcgttttgccaacgaccttgaagattacgcgaaagtagatcagatgcctatacttgagggaaagcgtatgactatacaactttctccgaaaaagaaagaggcagctaaaaagccagcagcaccgaaacctgccgctcctgtgcagaaagctgaaaagccggaagctgaggaagaataagagaaaatgcgtaacgcgcaggtatagtgcgttgccattatatatttaataatttaaaaataagtaagatgccaaagatgaagactaactccggttctaaaaaaaggtttacccttaccggaacaggtaaaatcaaaagaaagcacgcttttcacagtcacattttgactaagaaaactaagaagagaaaaagaaatctgtgctactctacaactgttgatacaacaaatgtaagccaggttaaggaactcttagcaatgaagtaatcaaaagcgtaaaagtattattaaagtattaaccgaatgcattagcctgaagttcgctgcgtgaagtagcggcgctaacattcaaaaaaagtaaaactatgccaagatcagtaaatcatgttgcttcaaaagcaagaagaaagaaaattttgaaattaaccagaggttactttggtgcaagaaagaatgtatggaccgtagctaaaaacacttgggaaaagggtttgacttacgcgttccgtgaccgtagaaataagaaaagaaacttccgcgctctttggatacagcgtatcaatgcagcagcacgtcttgaaggaatgtcttattctaaattgatgggcggtctgcacaaagccggtattgaaataaatcgtaaggttttggctgatttagctatgaatcacccggaagctttcaaagctgtggttgctaaagcgaaagctgcttaagactcaacagtttatgaattacaaagtgtcagttgctaggctagtaactggcactttttctttgcacggcagtgaaaacagaataaaaaaatgttagtaggtaaacaaaatccttttttttcttgctaatatcaaggattcttattacatttgtgatacaaaaatattagccgtatcgactggatcgggaaactcttcaaattaatctgatgcaccgagaaagcttcgttcttcaatggcggaccacatccttcgggacagctttaagccggtggattacaaagaggacgagcgctcaaatcttgttctatcagagtttcatcacatcgtcggtacggctttcttatatacttttctatgatattttatttctcaggtacaggtaattcaaagtggatcgctaatcagctgtctaaggaacaaaaagaggatttagttttcattcccgacgcattgaggagtggagtgttggagttttgtcttaaagaggaagaaacgatcggattcgtgtttcctatttactcgtgggcgcctcctgagattgtattgaactttatccaaaaactctcgctgaaggggtacagagggcagtatttgttctttgtatgttcttgtggagatgatatcggcttgactcaacaggttctgacgaaagcgttcagacataagggatgggaatgtcatgccggcttttcagtcaccatgcctaacaattatgtattgcttccgggatttgatgtggatagcgaggaactggagaggaagaagttggcagagagtgtcgcggaacttaaaaggataaatactttgatcagtaaaagagaacacttgttttcctgtcacgaaggcagtattccttttattaaaacgagaataatcaatcctttattcaatcgttttcaaatgtcacctaagcatttctatgtaacagatggctgtatcggatgtaggcgttgtgagaagaattgtccgatggagaatattactatgtcagaagggaagccggtctggggaatgaattgcacctcatgcctggcatgttaccatgtatgtccccggcaagcggtgcaatatgggaaaagaacaaaaggaaaggggcagtatttcaaccccaattccggctattgatctttgattttaatgctgcaatgagataggtcttcgatgattgcaaggctttctactctgacaccctgctcttccagcactttgcgtccgttttggaatgctttttcaatgatgaatcccattcctaccagatttgctccggactgcttaatgagatcaagaacacctaatgccgcatttccgtatgcaaggaagtcatctacaaaaagtatgttgtcatttggagtcagaaaatcggagctgataacaacttcgtaatcacggtcttttgtaaacgagtggacggtggtacttagtgcattctgaatcgttttgggagatttctttttggcaaatacaacaggcaaatccatcaggtaacctgtcatgatagccggagcaatgccactggcttctattgtcataattttatttacgtttgtggctgcaaaacggcggacaaattcgactccgattgatttcatcagaacagggtccatctggtggttgataaaactatccactttcagaatacctccttcgtaacattttccatcttgcagaattctttttttgagtaattgcatataatctgatattaattaataatgtgctaatatgccattccggatgatgaaacaaaggacggcatattagcacatgaactattttagtcttacttgttatctcttaaatctttcacacgaacggctttcccctcgctttgaggtagagaacctttcttaaccagttttactttgggagtaaccaggatttcgtctttcagttggtgggtaatatccttgcgtattttctccaattcaatataattgtcggtagaaagatcgctcagctccacttcaacaatcatttcatcctgattattgattgtttccagcgtaattaaatagttgctgcccaattcggggaattgtactagaattttctctacctgcatcgggaaaatattgactcccttgatgataaacatatcgtcactacgtcctttaatccggtcaatacggatatgtgtacgaccgcaaggacattttcccggaagaatacgggttaagtcgcgggtacgataacggatgagcggcatcatttcccgatcaagggtagtgagtactaattctccggtttctccttcaggaacaggttcgcctgtttctggatcaatgatttctactaagtagcaatcctcccaaaagtgcattccgttctgttccagacattcgaaagcaacaccgggaccgttcatttccgtcataccgaagctgttgtatgcttttacacccaacatccgctctattttccgacgttgttcatctgtatggggctctgcaccgattaccaaagttttcagtgtggtgcctcttgggtctagtccttcttcctgaaagacctctgcaagacgaatggcatagcttggtatggcatgcagagcggttgtcttaaagtcattgatgaatttaatctgccgcttgctgttaccggctgcggcaggaacggtaagacagcccagacgttcggcgccatattggaaccctagtcctcctgtaaacattccatatcctgaactattttgaaaaacatctgttttacggattcctaccgtatataggcagcgggctaccagattagcccaagaatcaaggtcgtgttgtgagtgaacgataactgtcggatttccggtagtaccactggaagagtgaatacgcacaccatcattcctcatatctcccgccaccagtccgaaagggtagtgggcacgcatatcggctttggtcgtgaacggtactttacggatatcatccagcgattgtatgctgtctgaggtaataccatgtttactgaaaacctccttatagtatggagcgtttgcagcgatactgattgttttcttcaagcgttgaagctgcaattcctgcaacttctcccgactcatggtttctatttcttcttcccagtattgtgtactcatggcagtctctattattacataagcttttccgcaatttccttgccggcagccaatgctttaagattcatttctacaattgcttcccctttacgttggaaaatctcgtgaatgctgtcctgcacttttgcgtagtcaatgccaagaaatggaattgttgctcccaacaggacgatattggctactcgtgcggaaccggcttctttggctactttatctacattcaatactatcttatgaggtagtttgttgatttctgccattactttgtccgtttccggatagttgggaatattgacaaaaggagtttcattcgttaccagccacccttcagggctaaggtaaggaagatatcgaaggccttccataggttccagtgagataataagatcacatttgccggaaggaatcaaatcggaagcaatcggctgatcgctgatgcggaggttggattgaacgtctcctccgcgctggctcattccgtgcacttctgcttgtttcatataaagtccttcctttaaagcggctttaccgattacggtagcaatggacaaaataccctgtccgcctactcctgataatataatatcttttttcatggtttacttgcttctttttttacgtgctaatgtctggatacactctctgcgtggaataatgacagatacgccacaatattcgatttcttcgcgtatgatctgtttcatctcttcgtaattcttcttcaaaggaacaaccactctgatatgggcgggctctacaccgagacctgcacagattgcttcgatacgtccggttcctgcagaatcttgcccgcctgtcatagcggtagtctcgttgtcggatattacaattgtcacattggcgttttcatttacgcagtctaataatcccgtcattcccgaatgagtgaatgtggagtcaccgatgacggctacggccggaaacaggcctccgtcggctgcaccttttgccatagtgatagaagcacccatatctacgcatgagttgatagcattgaatggcgcatttgctcccagtgtataacagccgatgtcactgaatactttatgtgcgggatattcctctctgagcacttcagtcaatgtggtatacatatcgcgatggccgcaaccttcacaaagtgcgggcggacgcatctctaccacagacggaatgccaaattcggacttgttctctttgcttaccgcacgggctaccgagtcaggattcagttctccgtcttgcgacaaagtgccgtctaaacgcccttttacctttataccaatacccagataacctttcagttgtttttctacaaaaggttgaccgtcttccaaaacaagaatctcatcgcaagattctaccaactgatggagttgttttttcggcagtggatattgtccgattttgagtaccggatattcacagccttcggggtagttttccatcaggtaattgtaagcgataccacatgcgatgattcctagtttcttgttaggcccatctgtatatttgttgtacggtgattcttcggaggcctttatgaactcatcttgacgtgaaagtaatactttatagcgtttgcgggcatttccaggcaacaggatgaattgacgcgggtcgttgctgaatgatatttcattttgtggtttctgttccttgcgttctactccggaacgggaatgcgcaagtcgggttaccatacgcattaaaataggttctcccattttctcggagaattcaaaaccgctgtacaccatgtcatacgtttcctgctgattgctgggttcgtacatagggatgagggaaaaatctccgtagaaacggctgtcttgctcgttctgtgaggagtgcatactaggatcatctgccgctatcacaatcagtccgcctttcacgccggtgatggcagagttgacaaaacagtcagcggccacattcatacctacatgcttcatgcagactaaggcccgcttgccgacgaaagacatacctaaagcagcctccatcgctgttttttcgttggcacaccaacggttatgtatattccgttcggtcgttatcggggccatctgaatatattccgtaatctcagttgaaggagtaccgggataggcataaacacctgagagtccggcatccaatgcagcttgtgcaatggcttcatcgccaagtaagagttgcttgctcatatatttctttttatttagtgttgatcacagtttgttattctatcgggcaaagatagacttttcagttcgttttatcacaaatttacttgaaaatctttctttcattcagcgctttccaatattttcttgcatttgccatgtgttcggcataattggatgcgaaattgtgagtcccggaaaagtcctctttggcacacatataaatatagttgtgcttggtataattcaatacactgtctatcccttttttagaggggatacggataggcccgggaggtaatccggtatttatatatgtgttatatggcgaatcgattttcaaatgctcgttcgtaatacgtcgcagaccaaaatcctgtagggcaaatttgattgtcgggtctgcttgcaggggcatatctttgtgcaggcggttgatgtataatccggctactattggcttttcttcattattattggtctcttcttcaacgatggaagcaagtgtgctgacttcttccggtgtcataccgatcgcagtggcttgtgccaaccgttctttgttccagaaacgttcatgctcctttctcatgcgttcgattaattcatccgcactcatatcccagtatacttggtaggtttcgggaatgaaaagaccgggcaaggttgcttctgtgtatcctagttgggcttgaacggtggaatcaaacaactggcgagcaatctcggcagaatcgatcattaactgtttgcccatacttcgtgccagtcgttttaaagtacggacacttccgactgtgagattcatcggctcttggtaacctctggaaaaacggctgtatacatggtatacattgtcgttcggacggatggcataacgtcccgtgtgtatattctgttcgagatttttgtatttggccatccaatggaatccggtgagtttgttgacatatccgaacttttttattttattggtaatagaatcggccgtatcgtcccggtctacgtaaatgtatacggttttggacggatggaattggggagcaaacaggtagtaataaatagtccctcctgcaatagcgcaaagtaaaaatgttccaatcagaatggataataaaatagttctcttttttttcttcatcttatgagacgttatttttgcagcgtcaaagataagaagaatttgaataggagtggtttctttctgagatgaatctttcttctgcaatatttttgtctttatattaagtattatacccggaaaaacaaaaatgtcacattgttgataattagatgtttatgggtaaaaatagggctaaattaagataagtttacaaaaaacgtctagatgtttttagctttttgagaacaaaaaatgcattttttctgcaatgctttgtcactgagttacttatatgattttgtagctattaatactgttctattgggttatagttgaacaactgtggagaaggacaagtgtaattgacaggttgcataacagtatcacgctggttgctcaacagtaacagcttaatatctcggcaggttttattaatatgccgcaaggttttattaatataccaccggattttatttattggtaaagaagaaatcaatcggttcactgcatgattttaagatataatacggtatttctgattaattcggccattggaaataatctgcttctgcttctattttattttctatttcatcgggaagggccgcaaagaaatccatgtttgtaagatgttcaatactatctattgtcactgcgtatgtagaaagtggctctactgactgtttattgttgaataagaaaccgatagcccgcataggctttacgaaaggggagaggattaccttgaaaaactgttggggcactacaactttattttttccgatcgttttgggttgtctggttataataggtccgcatataatgataatggcgctgtctgctatcgcccaatcccggattttctcttccagatttttccaccctcttctgtttagttgcgggtgttgcggacacatattgctgaagtaaaatgattctttcatagcttgcggactccatttcatatctgcagccggtgccatgtgtcctttgtcgtatcccgaatgtgcatagtctgtattggttgctatcaagcctctgacctgcgggtcggtaataaaacggttacttcttttctcctttccctttgtctctttacgagtcaattcgtatgaaacccaattggggagttttaaatctttattgtaagaaacggtgtatccggtgtgatggatgatctgttcttgacgtcgggtaagtgacaccggtatttccaactcttttgttgtcggatttttacctcccgacttattgttctccgacttcgtaccttttgtttttttaccttctggcttcttgttctccggcttttggtcagatgaagtttgaaatgatgtgctggtctgtggcttttctttttgagaagtatcaatgccctgacaatataaataaacgccgtaaagaataggtataagtataatgatggtgataatacatcccaatttataattggaacgtgattcttttttgaataattttctgtttttgcctttctttcttcgattcattggtttgcaggtgatgatggggttgtttttattcttcttttctcatgctgaattcgcaaccgcaatattgctgattgtagaaattatattctttgatgattgcgatgcgtcgttcacttaatccgcctttacgccaattctgttcccaatatgtgacatcaggataatgtgtcacggcatatcgtccggcttcatttatctgttccaggcttttccaacggctggaagcaagggtagtggtaattacggagaaaccatgctcgtgggcataacgggctgtttccaacaagcggctcttgaagcaacgcaggcaacgtcctcctctttcgggttcctgttccattcctgccatttggcaacgccaggcttcgtggtcatagtcggcgtctacaatttcaagtcctaatgattgcgcataacgggtgcattcatcttttcttatgttgtattcttcctgtgggaaaatattgggattgcaatagtaaatgacaggggttatattgtgttgcatcagacattcgatgatagctgacgaacaaggagcgcaacaagtatgaagtaagattttgtcggctcctcccggaacttcgagttggaatttctttttcatgcggtaaagttagtatatattttgtcataccatgcaacactttataatttattcacaggcggaattatcattgattattgggacaaaaagtatcgaaaacaaaagttgttataaaaatagctcaaaaaataggcggattctttttgtagtttcaaataaagctgtaattttgcacgccgtaaacgagagacaaacgccgctatagctcagttggtagagcaacgcattcgtaacgcgtaggtcgccagttcaagtctggctagcggctctcaaactagaacgctgattattaattgataatcagcgttctagtttttacaggattccctattcttattttaaaagggaaatcctgggtcaacgtaacaatctgagggattttgtatttaagcatataatttagcaagtctatataagaaaaaagctctatctcttactcctctgaactgtgctctaaatgctttgattttagcattgaatgactctgctgcggcattggttgccctcctttcaaagaaattgattatattcagataatgtgtttgtatagaacgtgagacccttccaaaggtgaggaaccctgatttatctacttcatcataccaccttgccagccttgtcaaagcaatatccttaaacttacactgatgatagattaagcctaaccgcatagacagataatatcctttctttatatcgggatattccttgaaaagaatttcagcccgtattctttgagactgagtccataaggattccttcttgtaaagcagataaatacttctcgctaacaactgctttcttgtatctccattagcgaaaacaggtgcatgatacatctttccacaggcctttgcataagcaatctgagtggactcttcatccaaagcctcccagcgagcttttacacgcatctcctgcacagcttcataagctaacttctgtacgtgaaagcgatcggtaacacgtttggccgaaggaaagcagatgcgtgcaatctgctccatgttaggagccatatccaaggttatctcgcgcacttggtaacggcggcgacgggagagcttaagcaggacagaagtgaccgtatgaacgtccgtacctttaatgatggcaatcatactacctttaccaccgtgagcttctttattggtcagtacagtatagagttccccacgcgagagggctacctcatcaatacagatataagcaccgatattcttttcgaatagtagccaatcctctgcatgaacaagttggtcccaatggagataaccacttagatggttacggtattgacgctccaataaatccccgtcaactccatataaaacacctaagagcttgcaactgatcggatagctatcaatatagttcttttaaaaaagacgcaaaatcttgcgtcatacgagtaccttcagccaccatacgccagttacgagaaatatactcattatgcttctttaagagccagcgacgacgacgaatattaaggaagaccttcttgccacggagaggaaaatcctgaacaataacagggtcataaaagcctttactctcagtatcctgatctgtatacttctcaggaacgatatttttctcctcaaggtagaacacaacttcatttacactttccttcacatcaacaagatcaaagtagtctaaagtgccttcaggaagaagaaggcgataaccgtttaattccataagctatgaatttggagacaaagataacaatttataaatttacccctcaggtttttacattgacccgaaatcctgcgtatgtaatagatgtgaaatataaaaatgtaatctatgttgagtcgtattattgttttagtggttgccggagtagccgtagtctatatcgttcgctttatagataactttttctcccagcgtagaagataaaactaactttcaaacattctgctgcgtgcgagcatacaagcgccaacgatgccggctttgtctttcagcttagatgtgatgatggctgaatctttattaaccagatttagagagtacttgcgtacggctgtttttatgggctgggtgatataatcgccggttaaagataaagttccacctataatgaccagttccgggttgaagatattgattagcccggcaatctgtttgcctagtttctgcccgatttcttctacaatttcaatgcaaagcaggtcttctttattcacagcggcaatgatctcatcaagagtgatcggattttcctctgtggcgattcgtgtagatagaatggaactttccccactttgaatacgctctaataagatacgatgaagtgccgatccggaagcttccgtctccaagcaacctttttttccgcaatggcagattatctcattatcataagcactcatgtgtccaaattcaccggagaatccggattttccggtataaatcttaccatcaataataattccgatacctactccccagcttacattcacaaaaatgatatctttttctcctttcacacagccttgcatgtattcgccataagtcatggcgcgtgtgtcattatcaatggttactttatatcccaatttttcggataatacatccgccaacggcctttcctcaaaattgaattgactgaaactataccctgattcaggatttacacgtcccgacacatttacattaatatttaagatcttctctttattaatagtgagcttctttataaaattgagaatatgcttgcataactcattcatcccttcgattgagttctcaaatttataaggtatattcattttcaattctaccatatcacctttgaaatttatcagtccgatattgacggcgaatcttttgatgtctacacccaaaaagtaaccggattccggattaagcccatagaggttgggatggcgtccgccactagtctccaatttgccataatcattaatatatccgtcatcacacatttcaccgataaatttggtgacagttggtacacttaaatccagctcttttgaaagatcgggaattgtggaacttccattatatatataatgtgtaataatcctctttttgacgagagcgcttttagagcccttttctatttctttcaagaattgttggttcataactatgtatatttggtaattcacacaaagataattaatttttttattaatatgtggttttggggctttgaaaattagaatatcttgaatgttatattccctatatactatgtaatggatttatatataggataatgtagctatggacgattgtggatataataatgaaagaagacgatttgtgaggtaattcccccttctgttaattaataatgcgagaaataatgattttattaataaaatattttattatctattgtttatttaataaatatagctatatttgtgccgtgatattattaataaaactctatatccttaaatgaatttagtatgagaaactattttttaggtctgtgtttattatttgctttgtgttttacagcatgctctcattcagatgattctgttgatgtgctaattattggtggaggtgccagtggagtgactgctggtattcagtctgctcgaatgggggctgcaacattgatagtagaagaaactgaatggctgggtggaatgcttacatctgcaggcgtaagtgctgttgacggaaactatgatttgccagcaggcttgtttggtgagtttcgcgaacatttggcagattattatggcggacttgattctctaaaaaccggttgggtgagtgcagtgttgtttgaaccttcagtcggaaataaaattttccatgaaatggttgacgcggagaaaaatttaaaagtatggcataatgctactttggtaaagttggaaagagagaatgatgcttggattgctcaaattcagatgaaagataatacaatcaaaaaaatacatgctaaaatattgattgatggtactgaattgggggatatagcaaaaatgtgcggggtgaaatatgatatcggtatggaaagccgtcatgatacaaaagaagatattgctccggaagagaaaaataatatagttcaggatattacatacgtagcaatcttgaaagattatggtaaagatgtgactattccttgtcctgaaggatataataaggatgaatttgcttgtgcttgtgccagtcacgtttgtatcacgcctaaagaaccggatcgtgtatggtctaaagacatgatgataacttatggaaaacttcctaataataaatacatgattaattggccgatagaaggcaatgattattatgtaaacttgattgaaatgacccgtgaggaacgtgaagaagccttgaaatatgcaaaacattatacgatgtgtttcgtttattttctgcaacatgaattaggttttaatacattgggcttagctgatgatgaatatcctacagccgacaaattgccatttattccttaccatagagagtctaggagaatccatgggctagtacgttttgatttaaatcatgcttgtgaaccgttcaggcagtctcaacctctttatcgtacttgtattgccgtggggaattatcctgtggaccatcatcatacgcgttatcatggatatgaagagttgcctaatctttattttcatccgataccgtcatacggtttacctttaggaactttgattccgaaagatgttgaaggattgattgttgctgaaaaatcaatatctgtttctaatataattaatggtaccactcgtttgcagccgatggttatgcagatcgggcaggcagcgggagcattagcagctcttgcggtgaaagaagataaaaatataagagaagtatctgttcgggaagtacaaaatgcgattttggatggaaaaggatatttattgccttatttagatgttgagttagatcacccaatgtttaagtcactacaacgtatcggctctacaggtatattaaaaggtataggtaaaagtgttgactggtcaaatcaaatgtggttcagagcggatacattattattggcaaatgagttgaaaggattgggtgatgtttatccttttgtcaataagcaaatattcgaaggtaataataccatatcaattcagaaagctacagagttaataagaggaattgccgaaaaagaaggttttgagatgaaagagggtagggtagaagagatatggaatgaatttgaattgaaggactttgatatgaatcgaggcatcctacgaagtgaaatggctattttgattgatcagatattagatcctttcaataataaaaaagtagatattacaggacagtatattcaataggtaataataatataagtgttaactgctgttttaattaaactaatatgaaaacattagatcgaagagactttctaaaaaaagccacattggctagcgcgtcagccttgactgtaccaactttgtttgaatcttgtacttcaaaagctagtgccagtacagtagtggcaactgatggtttggaaagtaaactcattgttcctaaaaacaatggcttaaaaattaccggaacttttttggatgaaatatcacatgatattccacatcagaactggggtgagaaagaatgggacttggattttcagcacatgaaaaatataggaattgatacggtaataatgatccgttctggttatcgtaagtttgtcacttttccttctccttatttattgaagaaaggttgttatatgccttccgttgacttggtggatatgtttttacgtttagctgaaaagtatggaatgaaattctattttggactatacgattcgggtaaatactgggacacaggagatatgacctgggaagtggaagataacaaatatgtaattgatgaagtttgggaaaattatggttccaagtataaaagttttggaggatggtatatcagtggtgaaataagccgggcaacgaaaggagcgattggtgctttccatgcattaggaaaacaatgtaaggatatatctaatggattaccgacttttatatcgccttggattgatggaaaaaaagcaatcatgggaacgacaaaaatgactaaagaagatgccgtttctgtacaacaacacgaaaaagaatgggatgaaatttttgatggaattcatgaggtggtagatgcatgtgcatttcaagatgggcatattgattatgacgaattggatgcgttcttttctgtcaataaaaaattagcagataagtatggtatgcaatgttggacaaatgccgaatcttttgaccgtgatatgccaattcgttttctacccattaagttcgataaacttcggatgaagttggaagcagctaaacgtgccggatatgataaggctattacttttgaattttctcattttatgagtccgcaatcagcctatctacaagctggtcatttatatgacagatataaagaatattttgaaataaaataaatgttatgaagtctacaatcaattttggttatcttatattcctttctgttgtggcagcattgggaggctttttgttcggatatgataccgcagttatatcgggaacaattgcccaagtgactcaactttttcaattagatgcactacaacagggatggtatgtaggatgtgctttagtaggctctatcgtaggtgttctttttgctggaatcttaagcgataagttaggaagaaaacttacgatggttatatcagctgtgttgttttccacatcagctttgggatgtgctctatcagccgattttactcaattggtgatttatcggataataggtggagtagggataggagtcgtttccattgtttctcctctttatatctctgaagtagctgtggcgcagtatagaggacgtttggtgtcattgtatcagttggctgtaacagttggttttttaggagcttatttagttaactatcaattattggcatgggcggagagtggtacgcaattaagtgtggattggttgaataaaatatttataactgaagtatggagaggtatgttgggtatggaaacattgccggcactcttattcttcattatcatattttttattccggaaagtccccgctggttaattgtacgtggaaaggaattgaaagctgtaaatatattagagaaaatatataattcaattacagaagcgaaaagtcaattaaatgaaacgaaatctgtgctgacctctgaaacaaaatcggaatggtctttattgatgaagcctggaatcttcaaagctgttattatcggtgtgtgtattgcgattttaggacagtttatgggtgtgaacgcagtactttattatggcccttctatctttgaaaacgcaggactttcaggaggagattctcttttttaccaagttctggtaggactagtcaatactttgaccacggttctggctcttgtcatcatcgataaggtgggccgcaagaagctggtttattatggagtttcgggtatggttgtttctctgattctcatcggcctgtacttcctcttcggagattccctgggagtatccagcctcttcctgctcattttcttcctgttctatgtattctgctgtgccgtttccatctgtgccgtagtgttcgtactcctctcggagatgtaccctaccaaggttcgcggactggccatgtcgatagcaggattcgctctgtggatcggaacgtacctgatcggacagttaaccccctggatgctccagaaccttacccccgccggaacattcttcctgttcgccgttatgtgcgtaccgtatatgctgattgtctgggaactcgtgccggagaccaccgggaagtcgctggaggagattgaaagatactggacccgttcgaaataaatataaaacagaccttgattattttaatgtactaacaagtggattgtagaaatggcagaagatgtttttttgtatggccattcaataaacgtttatcatctgaatagctgtcgatacaatcctgataatagattatattatggattttaagaatttagcaaatcaatataaggatgaattgttaaacaatgttcttcctttctggctccaaaactctcaggataaagagtttggtggctacttcacctgtatggatcgtgaaggcaaagtctttgatacagataagtttgtttggttgcaagggcgtgaagtatggatgttctctatgctctacaataaagtggagaaacgtcaggaatggttggactgcgccattcaaggtggcgaattcctaaaaaaatatggacataatggagaatataattggtacttttcccttgaccgattgggtagaccattggtagaaccatataacattttctcctatacttttgcaacgatggctttcggacaattgagtctagcaactggtaatcaggagtatgccgacattgccagaaaaacatttgatattatcctttccaaagttaataaccctaaaggaaaatggaataagcttcatcctgatacacgcaatctaaagaattttgcccttccgatgattctctgcaatcttgctatggaaatagagcatattttaggaacagattatttggaacaggcgatagatacttgtatccatgaagtaatggacgtcttttatcgtcccgaacttggtggaatcatagttgagaatgtagatgtaagcggtaatcttgtggattgttttgaaggtcgtcaggtcactcccggtcacgcaattgaagcgatgtggtttatcatggatctgggtaaacgtctgaatcgtccggaattgatagagaaagcgaaaaaaactactcttaccatgcttgaatatggttgggataaagagtacggtggtatttattactttatggatcgcaatggttgccctccacaacagttggaatgggatcaaaaactttggtgggtacatattgagacacttatttctttattaaaaggatatcaatttacaggtgaccgtaaatgtttggagtggtttgaaaaagtacacgattatacgtgggcacactttaaggatcccgaatatccagaatggtacggctatctgaaccgaagaggtgaagtgctgctacctttgaaaggtggtaaatggaaaggatgtttccacgtgccaagaggactgtatcaatgttggaatatattgaaagatttataaataatcattgtattaaccctttataatattatgatagacaattattgtaaaactagagtaaaaactcaaatgagtaggatttttacttgtctgttattgttgttttgtgtatgtataccaagcttgtacgcacagacaatgatacatggaaaagttggggatgcatcaggagaacctttgttgggcgttagtgtcaaagtgaaaggaaccggtatgggaactgttactaatgtagacggtatttataatattaatgtctctcaaaagagtactcttattttttcttttataggtatggctacccaagaagtaaaagtaggaaataaaaccactatcaatgttacattggaagatgatgcggctttgcttgacgaagtagtggttgtaggatatggaacacagaaaaaaatgagtgttacaggttctgtagtgcaagttagttctgcggaattacagaaagccccatcctctaatctctctacaatgctacaaggccgattaccgggcttagtcgcaacacaaaatagtggacagccaggaaaagatgccacttcattgatggtacgtggagcaggaaatggggacggtaatgttttggttgttgtcgacggaattgttcgaccttttcctgctgtgagccctgatgaaatagaatctgtaacggtattgaaagatgctgcatcagctgctgtgtatggtttcaatggttctgccggagtaattttgattacgactaaaagggggaataatcagaaacccactgtaaacgtcaattcatccataagtttgagtactaatacttgttttccgaagtttcttaatggaccggattatatgaaatggtataacagggcacaagaattggatggatattccaaagaaagtttgcgttttactaacgatgaaattacacgtgcaattaatggagacccacaaggagtatatacaaacaccgattggtttgatcttgtatttaaatcggtggcgcctacctatagtaataatgtttcattatctggtggaaatgatcgattcaagtattatgttggagtaggcagctataatcaaaatggtgtgattgataacacttcttatgatcgatataatatacgtactaacattgacgcaaaagtgactagtaattttagtatcgccttaggtgtaggaatccgtcattctaatacttctgaaccagctttgggtactggtgccattatgcaacaagccatgttgtcatttccctatttgcctgcgactacttatagtggtattccggtaggcagccttaatggggctggtaatggaaaccaaaatccgatagctgttcgtgatctcggaggagtttctgatttacgtgaaaaaagaatggaaaccaatgttaccttaaaatatgaaattcccggaattaagggattgatcgcaaagtttaccgcttcctatgattacttccatagaatgacgaaaatagataagactccttataaattagctgtttataatcaatcaacacgtacatggggggaagcttatggtcgtttgttggcagatggaattactagtgtatcacagaactatgtagatcaatatgactattatatccaaccatctttggagtatcaaactaaaattaagaatcatggtatccaggctctattcctttacgaatatggtggagtaaaatatacaagtatgtcagccggtaagagaggttatccggtggatgatatactggatttaagttggggagacgaagtgattcctaatagtgtattgggtatacataaccaaagtaagcgaggaggatatgttgcacgtctgaattatgattatgctgataaatatttagtagaaatttccggtcgtattgatggaagtactcttttgccaagtaagaatcgctggtgtgtgtttcccggtgtttctttaggatggcgtatatctgaagaatcattcattaaagataatgtagatttgaactttattgataatttgaaattgcgtgcttcctttggacaattaggcagtcagacagggttaggatatggcatttcttatatgagtctagcttctttgagcgacaagcctaatgttgcattgggcagtacattaaaacgttatcttaatataggaagtattcctaatgaagatctgaaatggcaatatacaaatacttataatatcggttttgaggctatgttctggaaaggtcttttaggggtagaatttgatatgttctattcattgactaaacgtaaaatagaagcacagtctggttcctatcctccgtcattaggtggttattacagttcattggttaatagcggcgaacatgaaaacaaaggttttgaattagtgttgactcatcaaaataaaataggagaagtaaattatagtatcaaaggaaatctgtcatgggcacgtaataaaattttaaagataaatgaaacaacaaatgttcctaatgctaaacgtttggttggcaagccgatgggacaatattttggatttgtttctgatgggttatttcagtcagaagaggaaatagctaatagtgcggtattcggaccaactttaccgggagatattaaacttgtcgatataaacggtgatgccaaaattacgatggaacaagatatggtacctatcgggcgtagtaatattccggaaatgacttatggattgaatttatctgcaaattggaaaggttttgattttaatgcctttttccaaggttctgcattgtttgatgtttatttgtgtgggtcctatccaggagctggttgggtagatgataccttttatacaagaccattttatgcagatggcaatgccccgtattatttggtagaaggtgcttggactcctgaaaatcgtaatgctaaatatccccgattaagcacggaagcccgcttgaacggtggtaagtattctgattggtgggtaaagaatggaacatatatccgtttgaaaaatgctcaaattggttatactttacctgctgaattaactagaaaagtaggaattgaaaaggtacgtgcctatgtatccggcagtaatttgtttacattaaccggagttaagtatttcgacccggaaatgcctaatgtaaatcagggatattacccacaacaaagagtatatgaatttgggcttaacataaccttctaataaaagagacctatgaagatatttaatattgtatgtaaaaaaagtatatgtttactttgggcttgtataggattggcaggatgtagtctggaacccgaacttacaagtaattatacagaagatgttctttggaaaaatgagacgaatgtagaattgtaccttaacagcttttatccattgatcggatctgattattatgcttctgctattgctgaagacggctatagtgatattgtaaaaatgactttacctcatgccaatcagaacttatgggcttttggctcactgccgatagatcaagccaataatgtttttgaaaattggagttggggatataattgggtgacgcaatgcaaccgttttttggatggtctgaaaaaacatggacaacatttatctaaaactatacaacagaaagcggaagcagaagtacgcttttttagagctcatgtttatttccaaatggcacgtcgttatggggcaaacttaattattttccgcgagctgcctcctttgggtgagaaaaatcattcattgagtgaaccggacaaatgctgggattttattgcagaagacttagactttgccgcacgctatctgccgaacaaagaggctgccgaacaaggtaaactaacgcagggagccgcttggggactgaaggccagagtcatgctttatgcggaaagatggaaagatgcttctgatgccgcagctatggtgatgggtatggggtacgatctttatcctgattatgcaggtttgtttaagattaggcgaagtgataagatggaaaataaagaaagtgtaatggagtttggctatataaaacctgatttagtctatacttttgatgtcacttattgtccaccaggtgataatggcaatgctgaagctactccgactgagaatcttgtttcacagtatgaaatggcagatggtacagatttctcttggaatatccatgccgcaaatccgtatgaagggcgtgaacctcgtttttatgcttctattctttacaatggagcctcttggaaaggacgtactattgaggcttatgaaggtggaagagacggttggggattaggagggaacacgacttctaccggctattatatccgaaaattcatggacgaagatatgattgactttaaagagaacgactacacttattactatatgcgttatgctgaagtattattgatctatgcagaagcaatggcacaacaaggatttgtaaaggaggcgttgattgagttaaataatgtaagaaatagagtacaccttcctgcagtagaggccacgactattgatcaatttatgatccacttgcgtcacgaacgcatggtggaattagctttcgaaggtcaccgtttttgggacttacgccgttggaatttggctaagtctacattgaataatacgcatcttaaaggtaaaaagcctatacggcaagccgatgaaacaattacctatgaggatgtggactgtgataatggtaagacccgcatatatttagataaatataaacgattccctataccttatacggaattgcaatcaaatgagctatgtgagcaatttgaagaatggagataatatttaatagaaaaacgatatgaaaaatatatttaagtcattgctttgggctgcttttgccttttgcattacctcatgtggtgaagtggatatgggtaatactccacaagcggaaaaaggattattgagtctaactgcgaaaattgcgggtgagagtcaagttttcagtcctactaaaagaggtccatataaggatggagatgtaattgaattcaaatttccttcacctatagaagatccagtggacttgtcaaaggtgaatttgatagttagtctggagaatgactgttttgtacaaccaggtttacccggaacgatagacttgacttctccatttgaattaaaagtcaaaacagcgataggagtagtaaaaacttatattatcaaagctattccggttggtcctatcgctacatttaaaaaaggctggtttaagaacggtaacgatttggattatatatggcctgtttggatttcatctattgccatatctaataatgactttgtgttatatgacggtgtggaaaactatgatgaaagttatattaaagtttacggtgagaaaaatgctgacttgaaaaagaaaataaaagcgccgcatacctttatatcacaagtgaaaacagatgatgcgggacatattattgcagcacgtgaaaatatctatggggctggatttatgttgtattattatgaagatatgaatagtgagccgaaattacttcttgattatatgcatgataatggatgtccacttctgttaggttatcgttttagtattgttggtaatctgaaagaagggaaagcatatatatatgcactttctggtaatacttattttggtgcacaaggtaaagaatattatcgttttgaattcaacgatggtgtaccgataagtacagttcctgtaaaggttgatttctctgataatataactggagtttgggagtctgcaaatattcaacgtcttacaactgccgataattcggatatttacttgtcttatttccaatattcaaattcagatacacaacaattgttaggtagtcacatctattgttttaatgaagaattaaacaatcttacagaaatgaatcgcaagaattttgattataaattattgggattccgtgtctttgaaatagatggtcatcgcttcttggcaatgcttacgcaggcttttggtagttcaagtgtctgtatgaaggtatttgatattaccaacaagaataattggaccgcaatgaatcctgattcagacaactataatgaattcctgatttttgaatcagaacaatacgcggtaaacaacatcaatcaatggggagacgtggctgtaaaagtagataataataaggcccaaatctatgctactattgtctctgctgataaatcacaatctggagtggcaatgtatgagatgacatactatcctcctacacaacaatagctttagaatcataacctgaaaatatttagaacaaatatgacactgaaaaatatgttagtaatacaatatttagcgtttggtacaatcgtagcattgtgctcttgctcagatgatgatattgatatacatcgtgtagctttacctgagactgtcaatcaagatgctgtggcgtatgtggaacaaaatgctaaagatactaaagtcatagagaattatgactttactgatggacgtaattatgtaatgagcgtaggagaaaattctccatctgctgctattagtggacaaacggtagaagatgctaaagaaggattaggagcacttgctgtcaattatacctttgctgcgaagtctatcagtacagaacccgaatatgtgactatgaaagaaatttggggaaactatcgtacagatctatcctttcatcctttaggactttcattatggataaaagggaacagacagaatccgggtgttttgcgggtaatgcttattcaagatagtaaaatggagcctggtattcaaatggaaaatcagtattttcagtatatcaacaaatctattttacaacaggatggctggcagaaattaattataccttatgaatctttccagttatataaaggtttggcacctgatgataaattgaacttatcgaaagtttttggttatcgtattgacatagttaatgagaaagatgagtcgggaacaggtacagtatattttgatgctctagaacaggttacctcatatcagcatcagtatgaaaagaaaggcaagttttcaagtatgtttattcaattgaacaaagtgtattatgaaaatccggagtacgatgattgggaaacttactttacagaatgtaaaaaagtaggtattgatacttggatcgtccaatatagtgttggatatggagcagaaaatacaatatcatggtattcaggctctactgtaggttggaacggtgaaggtgtgcaaacagaatgtcctataattgacaagataatgaatgcggcggaaaaaacaggtttcaaaataatcttagggcttaatggtggggattataatattgaaaaactagacgataaatggacatatgatgtattgctggcacgtaatgaagtagttgcaggagatttagctagaaagtatgcggatcatccgagctttgcaggttggtatattacggaagagtttcacgatgccaaatatccggcaggatggcaggaagaaaataaacgtaaattattgtcggactacttgacgcgtgtagctacttttgctaaaagtaaatgtaacaaacctgtatatattgctccggctttgtggagaggtatgccggctgaaatgtgtggcgaatggtttggagcattattaaaagaaacagagaatgttgactacatgtatttgcaggatttaggtggtcgtagtttggtggatgtacgcatagatcttcccaattactatggttatatcaaaaaagcctgtgaagaagcaggggtgaagtttggagtagacattgaatctttcttttattcatactatcctcccgtagattatcgtgccaaaacctgggcggagctagaagaacaattggctgtggccagtcaatatactgatcttataaccaattttagttgggcaacgttcaagcctggttatgatagctttgaaggatatagaaattattataattcattgaaataattattataactggaaattgcattggaaatagatgaaaatttcttctttttctagcgcaatttctttattgaaatatatatgtataagaaaactacattaggccttattatatgtttgctttcttgtagcttatgggcgaagggaaaggcaggtatagatttaacattaattcctcccgctactattacaaatcaggttgatttagatataagggtggggattacaaattatgatatttctgtccgtagcttggacgtttcactatatcttaataaaatagatagaaacacattattgtatcattctacttgtcaagtagagaaagataatcccctcaccatcagatataacatgcagacgagggataaagtgggaaaaaataaaataatccttgttgtaaaggatggaacaaagaaaacaatccaaacacgtgatattgaaattatagattcgaatatccgttccactcgcttaatagatggtgcttggaccagtatttaccattggagtgaaaccgaaggcaaacattggaacaatgatctgcggcgtatgaccgacgatcaatggcgggaaatgattcgttccatgcataaagtaggtatggatataattgtgatacaagaggtttttcgaaatgaacagtatgtcggtaaacacgacattaccgtagaaacctaccaaggtaaagctttttatccatccgacctatacgaaggaagaatggaaatcgctgcaaaagatcctgttgaagcaattcttgcagaagcggataaacatggtatgcacgtaatgatgggagtaggaatgtttgcttggtttgattttactcccgaatctttggaatggcataagagagtggctaaagaactttgggataaatatggtcatcatccttctttttatggattctatgtatctgaagagagtggcggtggtttagataattgggaaaaaactccggaaaaacgtcagattcgtaaaaatgatattgtcaatttctttgccgaatttaaaaagttttgcaaccggatggccccagccaaacctattatgctggcaacaaacagtatggatgttcctaatggaaaagaaacctatccggaattgctgaagaatctggatattctctgtccttttggttttgctcgtatgcctgaaaatgacctgacaggtaaacaggcggctactatgttgcaaaaattgtgtaatgatgcaggttctcatctttggttcgacttggaagccttcctctttaacgaagatcagtcattatatccacgtcctatagaacaaatcattcacgatttgaatttattcgataattttgaaaagattctatgttatcagtttccaggagtatttaatgatccgaagatgtctatccgtgtaggtgaaaaaagaactgtcgatttgtttgagggatatcagaaatatcgggagagaatattgtataatcggaaagctggaattaaaaatgagattgtttcaaccaaaactgtacaaggaacatggttgaatttaccctatcaggacgtacgtaataagtatatgaatccatttcatgtggattgtacggcacctgcattttggaagcaaaaaataaaggaatattcagatatcggactcgaatatttggttatcatggcagtagctaatgaacgtcaggcgtattatccgtcttcgtttatgaaatatgcctatccatcaaatagacaaagcccagttgaagctatcatggaagctgccgatcaatatggaatgaaggtatttatgagttgtgggtgggctgtaaatcaagatgacaatataagagaaccagcaataaaagaacttcaacaaaaaattatgaaagaaactgcagacttgtttaaagagcataaatcattttatggctggtatctacctgtagaagatatgatagctccttatttatctgaccatgcaatagaggctgtcaatactttggctgagtccgccagaaatttgactccccaagcacagattatgatttctccatacggattatattctgcagatattcggaatcctaagtttggtgaacaaataaagaaactgaaagtggatatcatagcttatcaggatgaagtaggatgcgttagagaacctatgccaatgcaacgtatgaaagaaaattttaaacttctcaacactattcataaagaagcaggaattcgtttttgggccaatattgagtcctttacatgggaaaaggagacgaattccagaaactctgcacttgttccggctgcttttcccagatacttatctcaacttgttggagtatctcaagctggagttgaaactgtagtaagtttttctatttatggaataatcgataaaccagactcaccaatgtttatagggcaacccatagaagcagcaaaagcttatcagaactataccgattggatggcaggaaaagaacgttggtcttttttagaaactacgtttaaaggcaacatacaacattctgctgtagataaacaaattacatacatatcaaggcctcatgatacatataatagcggtaatctgattaatggtaagttgggagtagagtctacggatgataaagaatgggtcggttttgaaaacaagaatatggagattattattgatttagggaggatacaaaatatcaacactttgggagcccgattcttgcaacattcagtatcttctgtcaatctacctttgaatgtatcatatttattatctgaagatggagagaaatatgattgggtatcttctattcccatggatataaatactaatcatttacatgattgttggattgatatagcttatgctgataaaatcagcgcacaagctcgctatataaaagtcattgcagaaattcgcggaaatggttggatcttttgtgatgaggtatttgtaaacccataaatgcatagtagctatataaaagatttatgagaatcaaaaaaacatcacaaagatatcaatatgatcattttatgttggaatagatagcttgatggcatttttggggggattttgctattctctactttttataagtatatagtaatagaaagtaaaacagataaaatacggtatttatatgcataattacgaataaaagaatggtcatttgcatataaattaccgtattatttgctaaaaacacacggttggttctaatgaaacgtacagttggtttaaaagaaacatacgattggttttaaagaaacgccacgtacctttaaaaggaagcgaattttgcttgtagaaatggaattacttgatttattagaagagcttttatgaacttactttattaaacaaaatgcataaatagattaagaaatacattcatcatgcaatacataatatcaaataataatgattatgctccataagggacggatttctttaatttctgaataatactaatggctaatctgtgcgattcttttctatatccggctgttcgcctgaataaattcaattatagcatcattcaaataccaaaatgataaaatatcattttggtatttgaagatttgtttctattgatataatgtataaaaagctatctatccagagtattggaaatagtgacgctatgtcaacaagatagtgtcgctataccgagtagatggcgtcactatttttatttgattgctttcttaatgattggacaaactaaatcagcatatctcatcatgcctagatctgtgaaatgaataccgtctatagtagcttctccatcttctcccaacatcttttgggaagagataaaaataatattcttttcattttctttctttagccggttgaatatttcctttagcgtatcattctttctttgcacttctttagctattctttcatcataaagtgtatgagtgaaaataggatcttctataaaaacgactggcgtagccggatgtttactacgaatgatatgatagaatgtttccattcgttctttcatctgttctacagaagcattaggcacaaagtctaaaacaaaaacactggcatctacttcggctatcactttggccacttccaagtctaaaagggcatttccgctaaatcccaagttgatacattcacggttcagccttcttgatatgatatttgtatgtgccattccgggacgtgaagcacaacctccttgaagaatactggtaccataaaatacaaccggctttttgcggatcggataatcaattaaaggctgatcgatggtggctaacgaatctactcctatagacaaagaaacaagaccatcgtaaagaggaagataaagcatatattctctctcttccggccgcatgttagcaatgattgttgcttgatttgtttttccacccggacgaccactattaacaaaacgccactctccattcttctgaagacaataaaggtctaagccttttgcacctgtatccgtcatatgattcatatgaaaattgatgagcgtttcccatttagcggctattgtggtagaattactacgaaaacgtatcgccattccggcagaattacggcttaaactccataacggagcacgggagatattcttcaatgaatccgggagcctttcatatcgggctccggtaacttcggtagcttttcctaataaagggaactttgaggcatcatgatatactaattgagcatatatatgacacaccgaaaaaaacattataaaaatacagattcttcttttcatattttgagtattattgtttcaagtccgccaaaaacattttattcgggtgaagaacatagttatcagtactgataatgttgtcaataccactcctcgtaagaatcccatccatgcgttttcgttgaaatatacaagcaatgatgcaattcctaataaattgaccaaaggcataatcaacagatctcctactacataagccatcataggattttgtccgggcattacgagaaaacgtgtactcttcacacaacgaaaatagtcacatattacattaaaaagcaacaaagccataaatgccaggcctgaagtgaggaataaataaccaaaagtggcggggtctttttttatacctccttgaaaaggttcaaaacataatcccaagataactagaaaagctccggctgtaaaaagttctctccaaagctttataaatcctgtgccttttctcaataaaaagactccacttatcaataacggaatatttattatcagattcaagactgtacaatgtgtataaagtcctgccaaatttacaataattatagctaatgtcaaaagaatcattacgatagctttccatttattggtagattcaacaaacgaatcattgtgttgcttcagccagtccatcaaatattctcccgcaatgcttcccggaatcacgataaagagatattgtaaatactcaaaatgaaaagcccatggtagaggtgtgtagttgtatatagcttgtgcccaggaattctcgacctgtccgctcaacaacaaagccatcaatatcagtaatacacctactcgcgcccggaggctttgcattgtgaaaatatatatgactgaaccaaaaacagccatatttgccaataataatatgataatattgctgaatgatacatcaaaaactcttccatttgcatattgagttgtctgtaacagaacaatagctatcccatatgctaccaccttaatagctatacgcatccaatccggcattttcagtggaatacgaatgaacatggggaataatatcacaaaacaaaggatggccaataaccagccacgcatgtcttgtggattactcaatacatgcggataaaaatgctggatgaaaatagcaaaaaaagtcaattgtgcacctcgtttgatagcttcatacaccaatctcaacttagtgtcccctttctcaaatctttttttgattgagaaagggaaagctgctcccattgcaaacaagaagaatggaaaaaccagatccacccaggtgattcctgataaactggcgtcgaaagctctgtccggcggaggagtttgcgcatgatacatccatccgggtaaagaattccacgcaaccgttgccgaaagcaccattgtgattatagcgtatcctcgtagggcatctaaagcataagcacgtttagtcataatatctatggattgattgtttgaatatattctttgccaaaacggtcggtaactttaaccgctatacgagcatctttatttttaggagttgcccggaacatatgctgggtaggtcttggagtaatccatgtatagaccatcttttcccggtccgaacataccactgatgcgtatgggtctaaacctgtatattgtgtcatgcttcccatcaattgaccgtcttccaaccattccactttccacagtttatcccagttccagacattagcaataatatccgacggatgctctttagaggcccctgccggatatgagcgaaactgatgttctttaggatatccggaacttttataataccatttcacatcgttaccattcacttcgtatacgccataaccgcgcggagtgccatccagacaaacatccgctttccaccacgtaccacaaaccgcagctgtattatgttccatcagattctcattaaatactacattgagattgtagtgagtgtgtcctgtgataagatgtgccttatagggtttcaagatctgatgcagtgcaccggcattaaccatctgattgccaatcatatcatagttatacaaaaaagcttcttgcttttccgtttgacgggaagggatatgcataataaagaatacgagtgaccctttcggtacgtatgataaatcctggtcaagccatgcaaatgtcttttcgtccagataacccatataaaaataatcacgtccgatgaagaagttgttgtctactacaatgtaatgggcattccctttattaaaagaatagtaggaaggaccaaaagtatcttcaaaagtcttgtaggaagtttcatgagtacgaccgtcataattcatatcatgattgccaactacacgataaatgggtatatccagttgatcggctcttttcaggtaatcgggatataattcttgatggtcgcctacaatgtctccgcaatcgataccaaaaacatcagttgttgcataagaagagagaagttgtttgcaatcatccactacatactgataaatagccagttcatctctggaagtaacctgtatgtcagattgagtaacaaagacatgagaggcatcatctttcggattcttctttaaattaaaattatagttttgctttttagaatgatcgattggtaaataaaaagaaggaatagtccctttccggtctgtcagataacctgaaggagtacaaatatacacaaaacggctgtctcccaaagttggtatattatactttccagaagcatcagtttgcacacatatacggccatcggtaaccattatcccctgtatccccttaccttcgcaggttactttacctttgatgatatgaatcgaggcttctgcctgaactgaaaagttcaagcagaagcacattaaaagcaataaaaaaaagtgtagtttatttgttctcatattgaggtgtactttgtaaatttatcgaatgatttcttttgcgtatttcttatagatttgccgggctagttttattccgtcaccaccttcgttatagttgattctgttactcggatttacccattcgttttcatacatccgtgattcattaaagaagacttcctcatcaaaagccttcttcttttcgacagctttaatcacttcatttataaaacgatcccaccggacagaataatactgattggttagtcctgcccatgaccgattggcgtagtcggtcaggtgatagctatctccccaaatggtaatcagagaacgggcattcatctcataatagtttttagaagcggcatcgtgtcccatatcgcgggcgtcagtgatccatttattcagagaaaaggtaggatgacagctaacgagcttatcaagatcagcaagaatttctctcattttatcccctcggtttttcatcatcattatatctccggcttcatatgcaagagtaaactcatcacggactacattaaaataatttcctaaaacttgtcgtccaatattgaccaaatcaaactcatagctatcccgttgacagtcttttactaacaatagtaatctccacgcttcaactaaatctttgggttgatattctattgtcggcttggtagtccaatgtccatttccctttaaacaaggacgtgcattggtaagtgtgccttgccctacttgtgccggctggatatacactttgtctgccagtatttcccatgcttttcttgcttcgggagacaccttgccagtccgtctatctgccagttttaagaaccattctttgtctgtctgaccgctattccatgctttatcaagaacaaattcatacataaactgattcaggtctatgccttcaagagtggaaccaactcctttaagattgctgccaccattttttaaagcatctgccaaccgttcacttaccaattcaactggccctgacaagaaagaatttcctccgaaattgcctaaataacaccaaagatagggttgcccgaaataactatcagtctgtttccatatttctgtatattcgcagaagtagtctaatagaatcaatttgtcttgaggtacagaacgaagataggattttatacgtggagtagtccaatgcttgatgtcagcataaaacaaccatgtcatttgtagccatattgctttcggatctacagcagccacagactcgtagatatgtttagccatcattcctaaagaatcggcatcccatgaaggaggatctatctcgttaaacggatctataccataaatatgatttgtgccatacaaacgagtttgttcggtaagatattctttttgtatgatcgcatacaaagaatccatagggttaaggaaagtgcaacgatattgatcggcgaatcctccccattcgcttactctggatgtttttatattgggatagacccgtttcaacgctgccggtacatgtccggcaaaagccggtaatacaggttgcatattaaactcacgttcacgggcaacgatctgttcctgtagctctgcctgacttgacagccactctttgggtaaggggctttgccagccgtccaaattacacattcgatgccacggaagatgtgcaggtcctgtaaaatagccacgtatttcttcatctgtcaatcctaatttactccagaccttataccagatggcttcctgaccggtaatagcaagaggcatattaattccgtttagagccatccaatcgatgaaatgttcccaatcactccatttccaccaagtcattgagtatccgaacgtacaatagttcagaaagaaacgcgttgggacatttgccttaatagtgacttccgccggtatattaggaagagtttttggcaattctatcggatcatccttataccatgaaatagtagtcaggcagtagtttttcaaataatgattcaaacctacagccatagagttagcattatttccggaaataataattttattcccttcacttttgatggtaaaagtatctgtagaagtatcattcaacagacgaaaatcaaaaaatgaagcctgttgaggaaacaaccgttgtgtcattttacgcatggtagtgatatttgtatcttccgcgcgaatttggcagatgacaacaagaaaaaggagcacactaaatattttcttcataatcatattattgtttgataaaacgaatagcacatccaccgcttgttaccagtttgacatgaagcgtatcagaagccgttactgttttttcttcatatttaaaagaagtcggatttgttttccattctgcatcatcaccgtcagcatatatttgagcaatatactttgcctccgtctccaaaaaacttaaaggaatgtccaactctcttgcattttcgtcagtgatgcaacctacataccaatcgctagagttgcgatcttttcgtgcaaatacggaataatcaccaattttcgcatctacgacataagttttatcccaatcggtaggtacatccttaataaaatcaaacgcttttatccctttataattttctggtaaatccgaagccatctgtaaagggctgtagataacaacaaagagtgctaattgcttgcaaagcgtagtattgacacgtgttcccggatatgcctcgttagtaaaattgaaagttccgaatgtaaaatccataggaccggctaatcctctggtaaaaggaataacagttgtatgttccggaggatttcctccatcgggagaccacgcattgtgttcctgtccgcgtacaccttcttgggtcataaggttgggccaggtacgttcaataccggtaggcataacaggctcgtggttgtcaattgctatttgatatttggcagctgtttctattactttccggtagtgacgtacgccatactgaccgtcatgagcttctttaaaatccattaggcgatttacatatcctgtttttacaacatgtactccatattgttgatagaaagcaaaagctttgtccagttggttctcatagttgcgtgtagcagctgccgtttcatgatgtccgatcagttccacacctttttcacgggcataatctgtaattgctttaatatcgaagtccggataaggtttggtaaagtctaaagaatcaccatgcttcatccagtttccttcccagccgacattccatccttcaactaaaacaccggagataccattctctgatgcaaaatctatatatttctttgtattggcagtagttgcgctatgtttaggaccataataccatgttcctttgcccaaatgcatttcccaccatatacccatgtattttcctggctttatccaggaagtatctttaattttggagggttcgttgagattcaacattaaataggaggtaactagatcgcccggtttatcaccaatcacgatcgttctccaaggggtaacaaatggagctttgatatatgctgctactccattagaccaaggtactaacgaagcacagagggtggcagaatccttgactgtcagattcattttaggataatctgtcagattggcttcgtgaatggtaaaatactttccttccgctgtttccattgtaagaggagtacgtacggtgtctagttcgttaatgggagagaaggttgctatacactcataatacggatcggatgcaggaatccaccaggctttgtgtgtacctgacattctaaactctgtttcttcactcataatcactaatgaatccatggattcctgttgcgggaattcataacgatacccaataccatcattaaacagacggaatattacattaagtttgcgctttccgtctgtttcttggagtagtaccttcaattcattatagtgattgcgtacataccggctctctccccaaggttgttcccaagtctcgtctaaagaggaacgttcggtacctttaatcacaaagtggtttaaactatcctcatgttccagaataaatcccagtttagaagggagtatcatagcggcgttttctttgtttactgcgtatgatattgtattatcattttctgtgattgttagttgtattttaccatccggagattttagtaccagattatcagtctcgttacaagctgaaaggaggctggtgattcccagaatataaaatactctccttaatacagttaatcgattcatcttctttccttttttatgtttttgcttatttagattgctgcattttgcgggtatatacattaccacaatgatctgtaacttctactcttatttcggaatccttcgtttcaggaaccgcataaaacaagtgttcggtaatgtccgctcccaaatacttatgtttgaatgtagaactgtttttctcgcagtattcataaatagcaggatcgtatccggaaaaacgggtcatttcccccttgtcaataccattttcataccatttcactttccaggttgaatcgtaattccaaacatttgctacaactgcctcctttttattacgactggcacctaccggataaagctcgaattgataatctttgtcttttcctacacatttgtaataccaattgactttacctccgtcaaactcgtaaacggcatatccgcctggagttccgtcacaagcccagggagcttgccaaaacagtgttgacaagggagcatgtacatgttcgtaaagattatctgccaaaacataattttcattatagtgctcatgtcccgacatgatatgggcattgtaaggttttagcaactcatacaaatgagaacggttgttcatgactttcatagtagactcttttccccattctttccgacgtgcttctcttgaatatgtaggaatatgcatggcaactactactgtagatcccggagtgacttgtttcaaatcctgttccagccactgaagttgctgctcggtgagataaccaacatataaatagctttttgcaataaagaaaatatcatcaagaacaacataatgtatatctcctctattaaatgaataataagtgggaccataataagatttgtaagtaatacgggcatgttcattagaacgtacgtttaaatctaaatcatgatttccaattacatagaaaaagggaatttccgtttcagctattgcatctatcatcggtgtaaagtaactgggctttttattgatgtcaccgataatgtctccacagactattccataggcaggaatcccctgataattagttgccaacagttcttttacatcttttgaagcctgctgtacttgtggcatttcttcatcgaaatagacttgtgggtcagcccataccaccaaaacgtgctttttgttgtcagtagatgatggtgtcagttcaaaatcaatatgcactttttttgaaggttgagcaggtactttttgaaagaacgcaggaactttacctttcatcggaatattatagccatcaggaagggtgatgtaaatgtattctgcattagaggtacttgatatggaatatcgtcccttgtcatccgtaaggacaatttgtgtaccatctgtaacaggtacattagcaattcccttacctccggacagtactttcccataatagaccacgggagtagtgattgcctgcacactgaaacaggaaaaactccattgtaacaagcttaaaagcaataatagtcttaatttcattctttaatcctttctattttaatcaaacgtgtgagaggcttgtttattttatatatttgagttatcaactggtctatttcagcttgccaggcttcacgtatctgtggaaacatggcttgggtgtaattggtatataaatacttcactaaatagtgactttcccgctccgctttggcagcatcaagagcagctttattatctgcgaaaagcaatcctctatgcttaaaaaacacatactgcatagccatatactggcgtaaacgtttttctatagaacatctttcctcattcagatacatgatagacaggctctgttggtattggggcgtgcatgttatttcagccagattaattcctttactcaactcattaccgtcccagcgtcctatttctgttccatcaatagtcactcggaaattgccatgcaaatcggtcactttcattatttcctgattcatttcctgcataaagggaacttgtctgacagcatcccgggctgtaccttttgttccccaacgaggaatagtgtcgacaggaaagggcaaggaacgggataaatagctgaaagatattgtgtcattttcgttctttatatgagttattcgacaatttctctcttccattgctttcctgttagttgcattgatatgaaaataagcgacttcttttcctgcaagtccctgtgcttttaagaacaaatacgccattaccatgtggccgtctttatccggatgaattctgtcacctccacagaaagtagctgtagaatcagactgctgaatctccttattcagctcacacatcactgtattgaaattaacaaatccccatcctcgcttttgggcaacttctgcttgcatttcaataattcttttgatcgtctcattctttccatgtaaagtttccactccttccaatttcacattctcatcataaggagaagaacccaaaagtactacgttttttattttcttgtctgcaagaatctgctgttgtagtttcccaaactctgtgttagcgtattctacctgtttatccgcgtacttatcatatccgggcttattatatccgtcatatccggaatcattcattccgaaggaacaaaccagataagttggctttttaattttaatatctgaatcgaaacgaaaaaccatgtggcttgcacaatcgccaccaattcctccattataaatacgaagaggcaattcggggaaatgcgtcatataatacagccatatataagaatgataatggcctccttccgttatactatttccgagaaagacaattctgtcattggctttaaatgatggaatttgctgtgcacttacgggaaacaataaaatgcaacaggtatataatatgaatagtatttttttcattgctcaatctttttattcaataggagtcagaattgctgcccaaccaccgcctttggccattgtgacattgatcgaatcatcttttgaaactattacctcttctgttttaaaatccgatgcataaacatctgcattcacaccatctttgaaaacttccattttatatttgtctgtctcaagaaaatccagttttacttcaatgctgcgggcattccagtctgtcagacctgccaaataccaattcttcccatttttacgagcaatcaccaattgttctccgattttggctgttatcgctttggtatcgtcccaagtggtaggtatacgggagataaaggaagcaaattcaggagctttataatagtttgaaggagaatctgctaacatttgtaacgagctttcatacactacatataaggctgcttgatgcgcgcgcgtacctaaactgatcggatgtacgaaattgatgtaaaaatcttccgctgtcgcattatttactgcaccgggcgtataatccatcggaccggctaccattctagtgaatggaagtatcaggtcatgtaccggattaatatctcttgaatctttatcgtgctctaatcccagtacaccttcaaaagtcatcacattggggtatctcttttgtaagccggaaggtttgaaagaaccatgaaaatcaacgagtaatttacggtccatagccgcttttcctacacgctcgtagaaattaaccatatattgatccgaacgttgcataaaatcgacttttatacctttgattccccatttttcataaatatccagaattccttccaaatctttatccagcgggttccacaaagtccataatacaaggccaacgtttctttcctttccatatcgtacaagttccgggatattaagttcggggattgcttctttaatattccaagtcccggctgaccatccttcatctaataaaatatattcaattccgtattttgaagcgaaatcaatgaaatatttataagtatcagtattcacacctgccttaaaatctactccatatacattgagtgtactccaccaatcccaagagatctttccgggtttaatccattctgtatcttgagtgacagatggagaggccaattgatatactaagttgttttcaattactgctttatcatcctcgttaatcattaatacacgccaagggaaggctcttgttccttcagtctcagcgatgtaagaggccttctccagcaatacttcatcacggtcagtaccttcttttagtgcactttttaaaactacaggaggaaattcgccggacagtgtgttgttgcgattacctgtcagaaatagattaggataatcggaaagatcggattccataataacaatctttgtacctttaggagtagaaagataaattggcagatagcctttcatctcttttgtaagagattctaattttaattcatcaaaaatagcttcacaatgggtaatatattcttgatttttttctcttggccaatatgctttgcaaccatcaatcaaattaagttcaacagtttcactgtttacaataatgggggattgttttagtacagtctcaaaacgataggcagccccattgttatacaccctgaatattatattataatcacctttacaaattaaagttaactgggtatattggtctctgatagttttctgtttaactggtacaactgcaatttgttccgcattgatcttgtcgacttttgcgttgataacaaccgggtttatacccggttgtatttttaatccctcaatattcatttgtatggcactaggtgtcaatatacgttctccgttgtagtcaatactccaaatcaattgtttatcagctgttattgaaactttgattttgttatctggagaatgaacaatatatttttttgcgtgaaccgatatacatatacctattgtacataatagaataaatattttttgtttcatttttctatacgcttaatggcctctttaatgtcagcccaagaattattattaattacatgagaaatctcgaatatcatcaatccatctgttcttttcatgcagaggtaaatagcatcagacagacctgtactgttatactggtatgactgaatagaaccatatactttacaatctccctttatataatcatcatatgtattgacaaagttctctacagaccatacagagttaggattatcctttatccatacggcctccgcatatgctcctaacacaaatacgtccaattgatttgcaaaccctgtttcattatacttttctgtatatcttatgcctggatctggaatatattttttacttgcccagttctgtccgacactatagcgtgacccccaatctgcggatgcccataattgaatttccatatccggattaatggttttgacttttgaacggatattggtaattaggttagtgatacacatagagcgaaactcaatccagtctttatataatgtcccgatacctccactagcagtgattatatcatttttatttgtcacactcttaccactatatgtttcgaatgcacgaatagtagcatcgctaaagccatagtttccaccataccaacgacaataatccagactaatacctttcagcttgggatatttagtaacaatttcttctacaatggaaataacaaactcttgaacttccggtagacatggatttaacattgctgcatcgacatcttcctgatcacgtatatccaccaattgagtaggatcattattttccggtaacataacttgcgtttttccgtcccatctgctatcctcatatatcggcccttctttcccttttgtataaccatagcccatggctgaaatagttgctatgacatcaatatccaaacgttccgcttcttccaaccaaaaacctaaataatcgaaatcacggtttacgatctcatctccccatttagttagtggagctagaatatcgctatcatacagggcatatcctataccaggttttacatcaagataaatttcgttaaagcctgtatcttttattttctccagatatgaagtaattgcatcttttgttgcaaaacgactcaaattagcatgtgcatcaatccatatccctttgggcttattaattttttcttctgattcattaggtgacaaaggtatttccttttcatcattgttatctaaggttgttccatccgagtggcatgctgtcagccaaccaagggcaaacattagcaaatattttctcataatatataattttatttctattcaaaacaagtcattttataagtataaagtccgtatctaccaaaccaaactgacagataagcttcctgttgttcttcatcccaataccaatcaacccactcaccgaaactccatccacggctaatatcacctactgcgatatttagattttcatgggctagttcttgtaagttagatgttaatacagcagcagcgaaccagaaggaagtgccgcttgttaccgtaacataagttttaccattgataggaagggcggaaactatcggacagcgacctcctccacgagttgtagtaaaccctgttcctacccaccaagcttgtaatgtactttgccaaagtggtggcattgtgaacagtgttgaacctgcgaatgaattcacataacaatgaacgctatttgccgcacctgctgtaccctctgcatcacctattacaaaattaggttgatctgaatcatctataggagaaatcatttggaattgactgcaatcactacttacgtaccccgtttctatggtagaatatgtagatgccaaatgaccatcagttacctttatacggtagtgcgtacctgcagcatcacgtggagccaatgctgtaatccatgcgttagtcgtaatatctccagctacctgaaaattattcgacaagtcactggttggtgccatatttacattaattttgcctatggaaataggggtatcggatggcttggtccaataaaaaaattcagtttcatcattagtcactactgctgccacacaccttcctctataatctgatgtaatcatcttgatattggttaatgatatagaaccaatatttaatgaaccagcatcatttagggtcattttatctaccacctttatgcaataaggtgaattaacatcaatgtctatatatgcccgtgacaacaaaacgatataatttccacaatatgcatgatacatttgtagatcaccatattctacggcactcttacctgtattataaccttttaattctcctggatagcctaactctgtaaatattttatgagcccccacttctgcgtagctaaagccggctccataaggtagtttatcagatactccccaagtaacaatgtactcacgtgttgtggagtgatcctccgatgttactgtatattttacaccaccctcttgtgcgaaattttgtggtaagctggggtctggtgtcaccgtagatcctttagacaagtaaaatgttggtatagcagattttaactcttctacagcatcgaggtaaggagatactttaattgttattgtattatcatcacctatagatgaattgaacacagttccacttgtccctttgactttaaaagatatcattatcttagcctcatgccctaatttctcactaagagattcatccttacaagaagttagggataaaatacaactcatgatgattcctaataggaatattaaatttagttttttcatcttgtagtttattagatttgattcttattattcataataacctctaacacgataacgccgtgttgttccaactcctgattttacagtaataataataccatcacctgtaatatcatgccttccacttaatgatggagtgataatttcatcatacgtcaatgtcgcagttaagtatatattagttaaatctatatctttctccaaggtttgaggaatagcgaatatgatcaaaccataaccaccttctatatcttcctgattaaaacttccggtcatcagctcatcgtttgcattatattcataaatagcgccttggaactcaccacctccatgtgatgctttacaaatcatctgtgaaatggtatttgtgcgatgcacaaattcttcatcagctttagcacaactgtatgtcaaaacgaccattgctaaaattcctaatatccatgtttttattttatatgtagttctcatatcaactcttaattatattgttttaattaccagtagggattattctcacatagcttattatttgccgtttctgatgtaggtagtgagaaataataatatttttcgagaaaaatgcgaggtgttcctccatcacattcaactttttcataagaaaaagttgaatcatcattttttgtaatctttattccatgtgcattttgtccgttgattatattttcagcaagtttccaacgtcgaagatcccaataccggaagccttcacctgctaactctacacaacgttctttacgtaacagtttcataaatgattctttgtctggagcatcggtagtagttttatctggtagattcactctatttctcacttcatttagtgcttctaatgcttcattcttatattgatcataatttaactgggcatatgcttctgctttatttaagagaacttcggcataacgtaatacgacatcatattgataactgtgttttgttatatagtccgaataaccttcttgtagatattttctcagataataccctgtacaagtgtgagcattagtactaccactttgagtaaattctacgaatccatcacttcctcctacataggtctgaattgttcttccttcccattgacatccattatacataattgttgcatggaaacgtggctcacggtcagtataaggatcttcgtgcccttcacttttataagtgtcccagtcaaagatacttccatcttgaaattcatacaaatctgcgagttctgctgttggaacatgttcagcgtatgcgttaccatgtacggctatatcgccaaaggggcgattatataaatcataattgtgagtgacacttccttcttgataatataatgcaaataagatttctttagagttatcttgcttaccgtctacctgaaaaatcttagcataatctttcgccaaatcacctcccaattcttttactttatttgctgcatcaatagctatttgccattttcctgcatataatgccatacgtgaaagtaaaccgtatgcagtactttttgttgcgcgtcctttccatttgttaggttcggcatcagttccccaagtagcaggtaaatgttctgcagcccactttagctcttcaagcacaaaatcccaactttcagcttctgttatgcgctttttatttatatccgcatcatataatccatcatctacacctccgcttgtcccagaaatatctgtccggagaactattccgccatatacacgaattaaacgatagtatgaaaatgcacgacagagacgtgcttctgcactacgaatatcgcaccactcttgtccgaaactagaaactccataacgtttaatatcgtttaataagacattagcacgccgaattcgttcataataaacatcagcccaacattcgaaagcgcctgcacttccagacgagaaagagctagcttgtaataaagccttattatacgtatgtgtgtattgatcgtaagaagtcgacttcattaaatctgaataactatcataaaatactttgcgactattacccacttgtgagacgtctgtaaatgttttatatgatgctgtaacatacatgtcggctgctgtttcagagctccaaatagcttgatctgataatgacgatgtgtcatttatatctaatacattgcatgaggatagttctaaactggcagcaacgataattattaaactttttattgttattcctttcatattgatttcctcctgatattagaatgtaacattaagacctaaactataagttttttgttgcggataatatccattacttactgaagggctttctggatccacatatttaaagtgacttaatgtaagtagattggtacctgctaagtatatatttattcggctgaaaggtgtttttctcaacactctttctggaacattataaccaatattaaaattcttaagtcgcaaatattgtccattcacaacccaccatgtagaacgtgccgcattgtttccattggcaatggtagtcagacgtgggtatttagcatttgtattttctggtgtccaagctccttctattaaataatatgcagaattaccttttccaccaaatggactagtatagcttgtggctgcagttgtacctgagtcatatactccggataattcataatcacaatgcgtaactccctgccataacattgtagcataaaaatttttataagtaacttccatatttagggaaaaattaatttctggtatttgaccgtaaccagtttttacataatcgtattctggattaatgataccatcaccattgacgtccagatattttaggtctcctaggttttttgtccctgtaggagccgctggataattatctaattcttcttctgtttgaaacaagccaagtgcctgatagccaaagcgggtattcattggttgtcctaaaatcgcacgataattagggtaattatcagttacagctttttttaatacgcggttacgagcatatgagaaaattccttctaatctatatccccaatctcgattaatttgatttatatgttttactgtaagttcaagtcctctattatctactttgcctgaattctgataacttggatagtactcccctaaggaagtcggataactaccacttttgctttctagaatgtcttcagtaagtttatagaataaatccaattcgacgcctaatttttggtgccataggtcaaattcaaagcctaaattgaagctgtgagtcgtagcccatgttagatcacggtagatatacttattttttgtatagaattgagatataggagcatcgcctaataccatactattatttgcaatagcaaaatttgaattatataaataggctgttacattatcattaccagattgtccataactagcacggatcttgaaataattaacaaaaggaagtgcttcctgaaagaatttttcttgtgaaactacccaacctattgatgccgatggaaaaaatccccagcgattttcaggggcaaatacataagagccatcataacggaaagcaaattctgctagatatttttgatcgtaggcataactaaagcgtcccgcccatgatgcctgagccgtgtatgaatgtgaaccagtaattggattctctggaagaatggttcctaatgacaaatcaacaggatcatcactaaaatagcctgtttttttaccagtcatagtatctgaatatactttttgtgcttcataaaataacaatgtatttacatgatgctttttaaagtccagagaataatcaatttgtggtcgtaatagccatgtatctccaaaagaagctgcctttgtataagaattgtctttagaaaatccgcttgcgccaacaaccttttcatcaaaagtatcatttatactatataattcataataacggtcgaaattagaatctatggtattgcgataattataggctccgaatatagaaacttttaatccctttaagatatcagttaaaccagagaaatcatattctagtttataattggaatctaatgtccaacgagtttgttttttatatcctgattttgttaatgcagcataaccatttacataataggaacttcctgtccatgctgtaggcatcccattaaattcagatttaataatgggtattgtatttattgcttgtctaattgggtcaaattcaccctgattggcaattgctgtacctggccagtctctactagaacgataacctgatatatttgtcgaaaaccttagatttttggcaacttctacatctaagtttacacgtgcattgtaacgagtgaaacttgtgttttttaatgtaccttcttgatccatataaccaagactggcatagtatcgtgttttctctgtacctccagatgctgatatattgtgctgttgggtaaaccctgttctaaatatcatatccagccaatcagtttctccccaaatactgttaggatcattacttaataccttattttgaatatcggcagtccataatggagtgagattatccatttcacgtgctttattatgccaatacatatagtctctagcatttaaaaattcaggcattgctgtattttgagttattgtaacagaaccatcatatgaaatcttagctggaccttctccaccgttttttgttgtaatcaggataactccatttgctccttgtacaccataaattgaagcagctgcatctttcaaaatagaaatactagcaatgtcattgggatttacatagtccataggacgcgctacaccatctacaataaccataggaccattattactaaatgaattcaagccacgtacatataaagttgttccatcatcacctggcttacctgacgcttggatacttgtcaaacctgaaattttaccagtaagcaaatttgagacattttgcattggtgctttcattaattctttggcgtttattgatgatactgcgctagtcaaatgtccacgtttttgacttccgtagccgactacaacgacttcatctaaagtttgagcgtcttctttcatttttatcactaagttcaagcgaccttgaagaggtatttcctgagtcaaataccctacataagatacaactagcgttccttgggaattttgaacctgaaggttgaaatttccgtcaatgtcagttatagatccatgagatggatttccctttacactgactgtagcaccgattagtggttcattattagaatccaacactgttcctttcacattcgaggcttgttgcgcccgaatacataatacggaaaacagacataataataaggttgtgaaccttatactccatgttaattgttttttcatataaatattagtattaataaaacaaaaagtgattattcttctttatttttgtacttcagcatatttgatacctgtctttattccatcccacaaattcatctcaataacttgtacaatatcaaacaccatcaatccttcagattttgttaaacacacttttacagcatctgctatgttagtttgatgatttagagcatagatggtacccaataccttacagtctccattaattattttttttgcacgctctataccaaattcgatagattcaggatcatccattccatagattttttctagatatgttccgcatagaaaagtatctaaataaggtgcaaatcctgtttcattataggcttttgatccccatgcataattgagagaaaaatcagatttgggactagcccaattttgaccttgtccataaattgcatgaatccatgaagcagcccaatattccaattttacatttttatttatactatgaatattttcacggacctcttttacaaaactggaaattacattagcacggaaagcccaccattctttaaaataaattcccggtcttttgctcccatctgtattccagctaaatatatcttctggaaagttcttaatctttttccctaaatagttctcaaaagctttacgagtttcattagaaaaatcactattatcagcaggatatcggcaatagtctagtgcgtatgcatctatatcatagttctttacgatttcgcgtataatacttaatgcaaagttacgaacatctttgcgaacaggattcaaaaaggctcctaccttttgcttatcatctctaatatcgagcattttattattagacatatactctaaacatgtttttccgttccatcgtttgtcttcatagaccagcccctcacaggtagcgggatgtccagcagtaaatacagccgtagaaacagtgacttttagccctagacgatgagcttcgtctataaaatattgtaaataatcccaatcacgttcgatgaccttattatggactgtagtaagtggaggaagtattttacttttatataaaacttctccataaatgggctttacatctactacaacctgattaaatcccacgtcttttgctttttccaaatagtatgaaatggaatcttttgaactaaagcgttcaaaattggcttcagcatcaaaccaaagatattttggcttttccttattgatatttccagcaaaagaatatgtggtaaataatagtagaatggataaaataagatttttgttaagcatattatttattagtgtttatagttttatttcttctaatgttttccagcactgaaacagccctcttggtacatggaaacatcctttccattttcctcctttgagtggaagcaagacttctcctctgcggttcagataaccaaaccattcaggatattcgggatctttgaaatgtgtccatgtatagtcatgtactttctcaaaccattccaggcttttttgatctcccgttaactgataaccttttaatagagatatcaaagtctcaatatgcacccaccagagtttctgatcccactccagttgttggggaggacaaccgttacgatccataaaatagtagatgccgccatactccttatcccagccataattgagcattgtaaggctggtctctttggctttctctatcaattcaggacggttcaggcgtttgcccagatccatgataaaccacatcgcttcaatagcatggcccggagttacctgacggccttcaaagcagtcaaccagactaccgtctacatctacattttcaacaatgatacctccgagttcaggacgatagaaaacctccattacttcgtggatacaagtttccattgtttcttttagataactttcatctaaaagatgttctatttccagagctaggttacaaaggatcattggcaaggcaaagttcttcaaattgcgagtacccggataaagcttgttccatttgcctttcggattatccactttagacaggatgatatcgaaggttttcctggcaatgtctgcatattcctgattgccggtggcaagacttagctgaccgaaagccatggtagcaaatgtatatgaaaaaatattgtacggttctaccaatggtctacccgaacggtcaagggaaaaataccagttataattgccgtcatgtccatatttttttaggaattcgccaccctgaatggcgcagtccaaccattcttggcgattttccactttattgtaaagcatggagaacatccatacctcacgactttgaagccaaataaacttatccgtatcgaacacttttccttcacggtccagacaggtgaaataaccaccatactcgtggtcttgggagtgttcaagccagaaagggaggatactgtccagaagttcattcttgtacagacttgccagtttctcgaaatccatactattatttccattatagattggtatgggcaattcagcagtgaaagagatgtctgctgaatgatcaatgttgttcttactatccatatttataagatgttagtttattgttattaaggtctgttttatatttattccgaacgggtccagtatctttcaatctcctccagcgacttcccagtagtctccggcacgagtttccagacaatcagcatatacggcacgcacatgagggcgaacaggaagaatgttccggcgggggtaaggttctggagcatccagggggtcaactgtccgatcaggtacgttccgatccacagagcgaatcctgctattgacatggccagtccgcgaaccttggtgggatacatctccgagaggagtacgaacaccacggcacagatggatacggcacagcagaatacatagaacaggaagaaaataagcaggaagaggctggatactcccaaggaatctccgaagaggaagtacaagccgataagaatcagagaaacaaccattcccgaaactccgtaataaaccagcttcttgcgacccactttatcgataatgataagagccagaacggtggtcaaagtattgactagtcctaccagaacttggtaaaatgaaagttaactgtttgcatagctgtattatggtagaaaagttttatctttatcgcgttaaactaactaataccccccattatgagaagaattttttatttacttttccttgtcttattaggctattcttttgacgtaaaagcttcagacacagtatttatccatgaaacacaaatcccggttttgatagagcggcaggataatgttctgttctatatccggttggatgcaaaggaaagcaagatactcgatgaagttgttttagatttcagtaaaagtaccaacttagcggatgtccaggcaatcaaactctattatggaggaacagaggccttacaagatcaaaacaaaaatcgctttgcccctgtagagtacatatccagccatcgaccgggtgcgacattggcggctaatccttcctattccataaaatgtgcagaggtcggaccatcggaaaaagttgtattaagaggtaattacaatttatttccaggtgtcaactttttttggatcagtttgcagatgaaaacggatgcctctttgcatactaaaatagtctctgatttacgtgctgtaaaagtggataggaaagaactctattgtaaatctatttctccgaaagatattactcaccggatggcagtcggagttcgtcatgctggtaatgacggttctgcttccttccgtattcccggattagtgacaaccaataaaggaacattattgggagtgtacgatgtccgatataatagtagtgtcgatttacaggaatatgtagatgtgggtttgagtcgtagcactgacggagggaagagctgggagaaaatgcgtcttccgctttcatttggtgagtatggcggtttgcctaaagcacagaatggggtaggagatccctctattttggtagatactcaaacgaataccgtctgggtggttgccgcatggacgcatggtatgggtaatcaacgtgcctggtggagctcccatccgggaatggatataaaccataccgcacagctggtattggcaaagagcacagacgatggtaaaacatggtcgaaaccgatcaatataacagagcaggtaaaagatccgtcctggtattttctccttcaaggacccggacgtggaataacgatgagcgacggcacattagtatttccaacgcagtttatagactctacccgtgttccgaatgcaggaatcatgtatagtaaagaccgggggaaaacgtggaaaatgcacaatatggcacgaacaaatacaacggaagcacaagttgcggaaatagaaccgggagtattgatgctgaatatgcgtgacaatagaggaggaagccgggctattgccataacgaaagatttgggaaaaacctggacagaacacccgtcttcacgtaaggcacttcaggaaccggtatgtatggccagtctgattcatgtcgatgccaaggacaacgttttgaataaagacctcctgttgttttcaaatccggatacgactaaagggcgcaatcatataacaataaaagcaagtctggataaaggacttacctggttgcccgaacatcaaatcatgctcgacgaagcagaaggatggggatatagttgcctgacgatgattgataaagagacaatcggtattctatatgagagcagtgtggcacacatgacttttcaggcggtgaaattaacagatttgttaggaatgaaatgatagatataatagcggttaaactatccgatatgataaaagaataaaaccgtaatatttatcgtggcgtgcaaaaacaacatattttgttaaattatcagtgaaatttgctgaaaaaataatatctttgaatccgttaatatctaatgcccccactatgatgattaatttgatcggaaaaaaggctcaaatagcatgtgaactactatgctgttgcagtatggcatatgcacagagcaatgacaattccgaagttgtcgttctaaatacaggctgggagttttcccaggcagggacggagctgtggcgaccggcacaggttccgggcaccgttcatcaggatcttatcaaccataaacaacttcccgatcctttttatggcatcaatgaacaaaagattcagtgggtggaaaatgaagactgggaataccggactgcttttacagttacccccgaacaactgaaacgggatgacgcccaattggtttttgaaggccttgacacgtacgccgatgtatacctcaatggagcactgttgctgaaagccgataacatgtttgtcggctataccatacccgtcaagtcccaactccgtatcggagaaaaccttcttcacatctattttcattcccccatccggcagacactgcctcaatataactcgaacggattcaactatccggcagacaacgaccatcacgacaaacatttaagcatattctcccgtaaagccccttacagctatggctgggactggggaatccgcatggcgaccagcggcatctggcgtccggtgaccatccgtttttatgacgcagcttctatcagtgactaccacgtaaaacaactcgcactgaccgaccagctcgcaaacctgtctaatgaattagaaataaacaacatactcccccggccacttcagacagaggtgagaatcaatacctcattcgaaggaagtgcagaaaaaagcatcagccaggcaatcaccttacagcccggaatcaatcatgtttccataccttccgaagtggcatcccccgtacgttggatgccgaatggatggggaaagcccgccctgtatgatttctccgctcaaatcatagtagaagataaagtcgtagccgagcaatcgcaccggataggactgcgtactgttcgcctcgttaatgaaaaagataaagacggagaatccttctattttgaagtaaatggtgtacctatgtttgccaaaggagccaattacatcccccaggatgcactcttgactaacgtcactaccgaacgctaccaaaccttattccgcgatatccgcgaagcgaacatgaatgtcattcgtgtatggggaggtggaacgtacgaagatgaccgtttctatgacctggcagatgaaaacggaatactggtgtggcaagacttcatgtttgcctgcactccctatccgtccgaccccacctttctgaaaagggtagaggcggaagcctgctataacatccgtcgccttcgcaatcatgcttccctggcgatgtggtgcggcaataacgaaatactggaagccttaaaatattggggattcgacaagaacttcccgcccgaaatctatcaggaaatgtttcgaggctacgacaaactgttccatcagctccttccagccaaggttaaggaactggatgccggccgtttctacatacacagctccccgtattttgccaactgggggcgtcctaaatcctgggggataggagacagccataactggggagtctggtatggtcagaaaacattcgagtcactcgatacagacctgccccgtttcatgagcgaattcggttttcagtccttcccggaaatgaagaccatctccactttcgccgctccggaagattatcagatagaatcggaagtgatgaatgctcatcagaaaagcagcatcggcaacgccctgattcgtacctacatggagcgcgactatatcatccccgaaaaatttgaagactttgtctatgtcggactagtactgcaaggacaaggaatgcgtcacggactggaagcacaccgccggaaccgtccttactgtatgggtaccctgtattggcaactgaatgacagctggccggtagtatcctggtcgagcatcgactattacggtaactggaaagccctgcattaccaagccaaacgagtctttgctccaatcctcatcaatcctatccggcagaacgacagcctcaatatctacctgatttccgactgtccggacaccaaagaccacctgatgttggaaatgaaagtaacagactttgacggaaagaaacaaggcaagcctatacgactcaacacattgacagttccggctaacacttcccaatgcgtgtaccgtataaaaaacgacacctggctatcaccggaagaacagcaacgctgtttcatgcaactgaccctgaaagacaaggcaggaaacacccttgccgaaaccgtatacttctttagaaaaacaaaagacctgcttctgcctgaaacaaccgtttcctgcaagatgaaacagaaagacggcatgtgtgaactgacattgttttctcccgctcttgcaaaagatgtctttattgaaattcctttgcagggagcccgtttcagcgacaactttttcgaccttcttcccggagaacgtaaaacggtcgtcatcacttctccccaaataaagaaaggagaggagctgcctttgacaatcaagcatattcgtgaaacttataattaatctattaataacttaacacttaattttttagtttatgaagcaactctttaaattaaccggatgtctggcactagcaggactttttgcctcttgccaatcggcgcaacaggaagccaactaccagatcatccccatgccacaagaaattgtaaccgctcaaggaagtcccttcatcctcaagagcagtgtgaaaattctctatccggaaggaaacgagaagatgcaacgcaacgcaaaattcctggcagactatctgaaaacggctaccggaaaagatttcgccattgaagccggaacagaaggtaaaaacgcaatcgtactggcattaggcacggagaacgaaaatccggaatcctaccagatgaaagttaccggtgacggaatcacgattaccggtcctacggaagccggtgtattctatggcatccagtccctgcgcaaatcattgccagtggctgtcggtgcggatattgccatgccagccgtagaaatcaatgatgctccccgttttggctatcgtggcgcgcatttcgataccagccgtcatttctttaccgtggatgaaataaagacctacatcgacatgcaggctttacataacatgaaccgcctccactggcatatcaccgacgatcagggctggcgtctggaaatcaaaaaatacccgaaactgactgaaatcggtgctaacagaacagaaacagtcatcggacgtaactccggcgaatacgacggcaaaccttacggtggattctacacccaggaacaagccaaagaaattgtagattatgcagccgaacgctacatcaccgttgttcccgaaatcgaccttccgggacacatgcaagctgcccttgccgcttaccctgaactgggttgtaccggtggtccatacgaagtatggagacaatggggtgtatccgaggatgtgctttgcgccggaaacgaccaagtattgaaattcctggaagatgtttatggtgaattgattgaaatcttcccatcacaatatattcatgtagggggcgacgaatgcccgaaagtaagatgggaaaaatgtccgaagtgccaggcacgtatcaaagcattgggattgaagtcagatcagagccacagcaaagaagaacgtttgcagagctttgtcatcaaccatattgagaaattcctgaacgaccacggacgtcaaatcatcggttgggatgaaatcctcgaaggcggacttgctccgaatgctaccgtgatgtcatggcgtggtgagaaaggtggtatcgaagctgcgaagcagaaacacgatgtcatcatgacaccgaacacctatctgtatttcgactactaccaagctaaagacgtagaaaacgaaccgttcggtatcggtggttatctgccgatggaaagagtgtatagctacgagccgatgccggcttctcttactccggaagaacagaaatacatcaagggagtgcaagccaacctctggacagaatacatcgctaccttcccgcatgcacaatacatggtattgcctcgttgggctgctttgtgtgaaattcagtggtccagccccgaaaagaaaaactatgccgacttcctgtcccgtcttccacaactgattaagtggtacgatgcagaaggatacaattacgctaaacacgtatttgacgtacaagccgagtttgacccgaatccggcagaaggaacaatggacgttaccctgtctaccatcgacggtgcccctgtttactatacattagacggcacagaacctactaccgcttcccccgtttacgaaggagtattgaaaatcaaggaaaatgtaaccctgtccgccaaagccattcgtcccaacggcgaaagcaagacagtgacagagaagattgatttcagcaaatccagcatgaagccgattgtagccaatcagcctatcaatgaacaatacctgttcaaaggagcttccactttgatagatggtctgaaaggaaatagcagctataagtcaggccgttggatcgctttcaacggaaacgacatggatatgactatcgacctccagcaacctactgaaatctcaagcgtggcaatctctaccaatgtagcaaaaggggactgggtatttgatgccagaaacctgtccgtagaaacttcagatgatggcaagaccttcaaaaagattgcttccgaagaatatccggagatgaaagagacagacaaagacggaatcgttgagcataaactaacctttgctcctgtgaccacccaatacgtgagagtcattgcttcaccggagaaatcacttccggcatggcatggaggaaaaggtaaaaacgcatttttatttgtagacgaaatcaaaattgattaatgaatataagaaaagaataccctaaagtttgtcttttcttatggatattggggatgtgcttccatgcacatcccattctggcacagtccgtcatacctgtcccattaaaaatggagcaggggacgggctcttttttactgtcagaaaagactaaactttatacaaacctgcaaggtggagaagcggaactctgggagaattacctgaaagcattacctgttcagctgaaagaagcgagaatgaaagacaggaaacagatgcttttcttattgataacccccaagaccccccaattgccatcaccggaaagctatacactctccgttacctctcaacgaatcgagatccgggcaacttcgggagccggattattctatggaatgcaaaccctgttacagctgatgcaaccagtgggcacaggcagctattccgtaccctctgtcgagatagaagacacccctcgttttgcttatcgcggactgatgctggacgtatcccgtcatttctctaccaaagagtttataaagaagcagatagacgcattggcatattacaaaatcaaccgtttgcacctgcacctgaccgatgcggcaggctggcggcttgaaatcaagaaataccctttactgaccgattttgcagcctggcgtacagaccctacctggaagaaatggtggaacggcggacgtaaatacctccgttacgatgaacccggagcttccggcggctattacacccaggacgatattcgtgaaatactggaatatgcccgtcagcattacatcacggtgattccggagattgaaatgccttcccattcggaagaagtgctggctgcctacccgcagctgtcctgttcgggagaaccttacaagaactccgatttctgtgtcggtaatgaagaaactttcacctttctggagaatgtactgacggaagtcatggaacttttcccttccgaatacattcatgtaggaggtgatgaggccggcaaatcggcttggaagacctgtccgaaatgtcagaagagaatgaaagaagagcatctggccaatgtagacgagctgcaaagctatctgatacaccgtatcgaaaagttcctcaacaatcacggacgccgtctcttgggatgggacgagattctgcaaggaggtatcgcgcccaatgcaaccgttatgtcgtggcgtggagaagagggtggtattgctgccgtcacctccggccatcatgccatcatgacaccgggtgcatactgttatctggacagctatcaggacgccccgtactcccagccggaagctatcggcggctacctgccattgaagaaagtatatgcctacgatcctgtccccgcttccttaactgcggagcaggcaaagttagtctatggtgtgcagggtaacctatgggtggaatatatccccactcccgaacacgtggaatatatgatttatccccgtatgctggcattggcggaagtagcctggtcggctccggaacgtaagtcgtggcccgattttcatacccgcgcactgtcagcagtggccgatttacagaaaaaaggataccatcctttcgatttgagcaaagaaatcggcagccgtcccgaatctcttcaaccagtcagccatttggcgctcggtaaaaaagtgacctataactcctcctatagcccccattatcccgcacaaggcaacacagccctgacagacggcatacgtggtgactggacttacggtgatggttcatggcaaggatttatctcggacaaccgtctcgatgtgacgattgatatggaaaaagaaacccctatccattccatcaccgccgcttttatgcaagtggtcggcgcggaagtattcctgccggagacagtgattatttccatttccgatgatggaattaacttcacggagttgcaaaaacaacactttgaagtgagcaaagaaacccctatccggtttacggatatttcatggcagggagaagccaaaggaagatacgtacgttaccaggcgcaggccggaagcgaattcggaggttggatatttacggatgagataattgtgaaatagttttcagcgtgatccgtatctgctaatttcaatctgtcaatatcattgataaataaaagagggaatctactcaaccagattccctctttttttgttatatttgtattattaccttaaaaactaagaatatggtacaacacgctagactcattttctacagccttcttcttctgataatcccgtgcgagagcaccttggcgcagaagattcccgtcacgcccatagactcattgataactgttggatatgccaccggaagtttgaaaaccctctccggttccgtagagaagattacggagacacagatgaataaagaccagataacgaaccctttggaagcaatccgcggacgtgtgccgggcttgactatccaacgcgggtcaaatggtccggcagccttggatgcggtacgcctgcggggaactacctcactgaccagtggcaatgaccctttgataatcgtcgacggagtatttggcgacttgagcatgctcacctccatttaccctacggatattgagagcttcaccattttgaaagacgcttccgaaaccgcacaatacggttcacgaggagcttccggtgtgatcgaggtcaccactaagaaaggaatgagcggcagaacacaggtagcctacaacggtagcttcggaatttccaccgtctacaagaatctgaaaatgctgtccggcgatgagtaccgccgtgtcgcttcggaacgcgggatttccattctggacaaaggaaataataccgattttcagaaagagattgaacagacaggactacaacaaaaccatcacatcgccttttatggtggttccagtgagtccagctatcgcgtttctcttggtttcatggatcgtcagggagtgattttgaatgaagacatgaaaaacttcacttcgaatatgaacatgaatcagaaaatgttcgacggcttcctgaactgcgagctgggaatgttcggttccattcagaagaatcataatctggtggattatcagaaaacgttctattcggcagccacattcaaccccacctatcccaaccataaagaccccgtcaccaattcctgggacggaataacaaccgccagccaaattaccaatccattggcatggatggaagtgcaggacgatgatgccacttcgcacatcagcacgcacgcccgtctgactttcaatctgctggaaggactgaaactaaacctcttcggcgcctatacctataatatcgtggaaaattcgcaatacctccccacctccgtctgggcgaacggccaggcttacaaaggaaccaaaaagcgagaatccttgctgggcaacatgatgctgacctataagaaaaactggaaaaaacatttctttgacgtgttggcacttgccgaacttcaaaaagaaacctacacgggatattatacaacagtaagcaatttcagcaccgacaaattcggatataataatcttcaggcaggtgcactccgcttatgggaaggcactaattcttactacgaccaacctcgtctggcatctttcatgggacgtttcaactatacatacgccgaccgctacgtactgacgctgaacgcccgtacagatgcttcctccaaattcggagcgaaccataaatggggattcttcccctccgcatctgccgcatgggtgattagtgaagaagaatttatgaagcagttaccgatggtggataatctgaaattccgtattggctacggtctggcaggtaatcagagtgggattgactcatacactacattgaaccttgtaaagccgaacggtgtagtccccgtcggaaactccgccgtcgtatctttaggagacttacggaacacgaatcccgacctgaaatgggaagtgaaacatacctttaataccggtatcgacgtagctcttttcggcaaccgcctgctgctttccgccaactattacaactcccgaaccacagacatgctttacctttacaacgtaagcgtaccgcctttcacctataacaccttacttgccaacatcggttccatgcgcaactggggtacggaaatcgccatcggcatcacccccttgaagaccaaggatatggaactgaatatcaatgccaatatcactttccagcgcaacaaactgctctcattaagcggtatgtacaacggcgaaatgctttctgcccccgaatataaaagtcttgccagcctcgacggagccggctttcacggaggatacaaccacatcgtatatcagatggtgggtcaaccgttgggcgtgttctatcttccccacagtacgggactcgaatccgatggaaacggcggatacacctatggcatcgccgatctgaatggcggaggtgtcagccttgaagatggtgaagaccgctacgtagcaggacaagccgtacctaaaacgattcttggctccaacatcagtttccgctacaagcgtttcgacctgtctttgcagattaacggagctttcggacataaaatctacaacggaacctccctgacttatatgaacatgaatatatttcccgactataacgtaatgaagaaagccccgaaacagaacatcaaggatcaaaccgccaccgactattggttggaaaagggagattatgtcaacttcgactatgtgacgctgggttggaacgtgccgattgagaaagtgcagaaactgaagaaatatgtccgttccctgcgtctggcatttacagtcaacaacctggcaatcatttccggttattcgggactttcacccatgattaacagttcaacagtgaactccactttaggcgtggatgataaacggggatatccgttggcgcggacgtacacactgggattgagtattaacttttaatggaggaggagatgatgaaacaatatatgaaaaataaaagtctttttttgcagaaagaagaactgctttcaaggatagcggaactgttttcaaagaagatcttacgtccttcgggagtgctggtattccttcttataacgtgcctgggcttattctcatgtagtaagtttttggaggaaaatccgaaagataagttacccgaagatgacgtttacaatacaatttcggaagtatatctcaatgcagtagcttcgctttatacatacgtaggtggttgtagtgatagtcagggattgcagggaacgggtaggggagtctacgacctgaacacctttacttccgacgaagccattatccccactcgtggaggtgactggtatgacggtggtttttggcaaggactttacctgcacgattggggaatagagaatgatgccattcaggctacatgggaatatctctataaagtcgtcatgttaagtaataaatcactggagcggatagacaaattcgccgaaactcattctgctacggaactgccggcataccgtgccgaagtacgtgccatacgggctatgtattattattacctgatggatttattcggacgcatcccgctagttcaatcctcttccgtagcaatgaaagatgtagtgcaaagtgaacggaaaacggtctttgactttgttatcaaggaattgcaagaggcggctcctttgttgagcgatgcacatagcaaccagtccggcccttactatggccgtatcactcgccccgtggttactttcctattggcaaaattggctttgaattctgaagtctatacggataatgattggacggacggacaacgcccggatggaaaaaatataaagttcatagtgaacgacagcgaactcaatgcctgggaaacagtcatctactattgtgatcaacttaagactatgggctacaaactggaaccggaatatgaaacgaatttctccatattcaacgaaccgtccgtagagaatgtcttcactatcccgatgaacaaaactctgtacaccaaccagatgcaatatctcttccgttcccgccactataatcacgccaaggcttacgggttaagcggtgagaacggtcccagcgccaccattgaagccctcgaaactttcggttatgaaaccgcggaacaagatccccgttttgatatttgctattttgcaggaattgtccacgacctgaaaggaaacataatcaaactggataatggaacggtactggaatatctgccctggaaagtatctctggatataacagataccccatacgaacaaaccgcaggagcccgcatgaaaaagtatgaagtcgacccgactgccacaaaagacggtaagttgatggagaatgacattgtattgttccgctatgcagacgctttgttgatgaagagtgaagcgaaagttcggaacggagcaaacggagatgaagaactcaatgaagttcgtagccgtgtcaacgcttctccccgcactgccactttagagaatatccttgccgaacgtcagctagaactggcttgggaaggatggagacgacaggacttagtccgcttcgggaagtttacaagagcttacagcagccgtccgcaactaccggatgaggcaagtggatatacaactgtattccctataccggagaaaatacgggtgatgaatgagaggttgaaacagaatccggggtattaggaagaagatagtagtaatcaaaataaaaaatcctcgattttcatccggagaatcgaggatttatattttctgttgcagcacttgtatagataatagctaatgcagaaatccatattatatgtagtgtggttattacccggtccagtcgaataactcaattaaatcgaattacccaatcaaatcgaaatcatatttttcaaattcactcccattgattattatagcaatttgatgaagcccgagatggaattttctcgttgtaaccacacggaaagagtgctttcgcgttattcgtgtggtagaattcccggcatattctttttcgctgattttatgaactttcttcgtcagcgttccatttgctttttggtaataaataccatattcaagccgtattttgattgtcttattgctatgattcaacaagttaaaaccaaactccaacgaatccccgactttaaccttaggacttgaaatctgaaaatcctccacactaatattatttctgatagaatcaaagccaaacaactccatcacctctggaatcccttgctttaagagcgtccggcaaccgtgtttaataatccagtctacctctttcgattcacccttccatttctttgccaaatcaatgacaatttccggattatctttcgcaatatcattcaaattattggcaacgctcaaccgtacaaatcttgccggatcatttttaagattctccaaaataggaataataggtgtcggatctttcttcagattcggcaaagccatcgcccaaggcaaacgcggacggcaaccttctgacgaaagccgcctgactccccaatgctcatgtttcgaccaaaccaacatctgcttcatcattttatccggatattttataataaaaggatgagtcacaaactcgcaacttgtgaactgtgtgattttctctatcgccttgacagacgtttcataatcatccaacccatattgctcgacataattattcagaatcaccccatactccagcatcaatccaaacttcgtatcgtctatcaccgaaaaatcaggccgcgtactttttacatgatccaacaactcaagaatcttagcgatcgcctctttgtaatctgtcggcaaaaactttttcagaatgctagtgatatgtatccagcgctgttttagttccctgccttcccattctcatccattatttgagaaacaaaaccgtgagcatcaaaatcatcgataacaagtctcaaatctttcgtaaacagatcgaaaaattgcttgttgtacatattcttaaaaggttctgccatacttgaagtctatatttagtatctatttatttgctacacaaatatatgtcttttttttaaaaggacaagccctaaaaacagaagtgagccacaaaaaagattgcagctcacttataccttatatattatagcaaaaaattaatcgaagaaactcttgaacttcttgaaaatcttctccttcactgacgtgttaggtttgaagttgtccgaagcctccatcttttcgagcgtgctcttttcctctttattgagcgcttccggcacatagatactgatgttgacgagtaaatcccccgttccgtacccgttcacattcggcaatcccttgccgcgcaaacgaagcaccttacccggttgagtacccgaatcaattttcactttcactttgccatcgatagtcggaatttctacagctccgcccagagcagcagtcgggaaactaagcaacagattataaatcaaatcattatcgtcgcgaatcaagtcctgatgcggttcttcctctacgagaatcagcaagtcgcctgccacaccgttgtgtttgccggcatttcctttgccacccatagaaagctgcataccctctgccactccggcagggattttcaccgataccacttcttcaccgtaaatgattccgtcgccaccacatttcttacatttgttcttgataatcttaccctcaccgccacaagtagaacaagtgacgcgagtctgcatagtgcccagaatagtctgctggttacggatcacggagccgctacccttacaagtaggacaagtctccgaaccaccgtcaccttcggcacccgtgccatgacactggtcacacggcacatattttttgagtttaaatttcttttctactccggtagagatctccttcaacgtcagcttcactttcacacgaaggtcactgccgcgataccggcgttgctgtgaaccgccaccgcctccaccgaatccgctaaaacctccgaaaccacctccgaaaccgccaccgcgacctccgaagatatcaccgaacatagagaaaatgtcatccattgacatgctttcgccactgaaaccgccgaacggccctccatttcctgccgcaccgctcactcccgcatgaccgaactggtcataacgcgaacgtttttccggattgctcaatacatcatacgcttccgcagcttccttaaacttctcttccgcctccttatcgccaggattcttgtcgggatgatattgaatcgcttttttgcggtaagccttttttatttcttctactgtggccgtctttgtcacctccagtacttcgtaatagtctcttttttctgccatgcttctttaaaaaaaatgagttttatgggttgtccttattcccctactaccactttagcgtggcggagcactttgtcgttcaatgtataacccgtttgtacacaatccagaatcttacctttctgttcctcagatggtgcagggattactgcgatggcttcgtgataatcggtatccaacggctggtctttagtctcgataacctttacaccgttttgtcccaatacagccatgaatttattataaatcagctcgacaccttctttcacggcactcacatcggttgccgtctccatcgttttgatggcacgctcgaagtcatccactatcggaagaatgctgctgagacttttttctccaccgttcagaatcagttccgccttttccttcatggtgcgtttacgataattgtcgaactcggcggacaagcgcagatatttgtctttctgctcatcaatagtctcctgagccttttccaattccttttccaactcctcttcgtgcgtcagtggagccgtctcttctgcttgttcgttttgcggttgttcatccgcaccgttctgagtttcttcaacattcagttcttcttccttcacttttttttcttttggatccattttggtatttactatttaactagttactatttattgtttaaaaacacgttatcttttagagataccgtctattcgacatactggactgaccggatgtcattagttttgcttgcaaaaactttgccaagtcggtgtttttgccagaaaacgcagcaaaggtaacacttttatgtcagattggcacatatcggatagctcataattcattttaaatgtctacctttgcacgctaaaacaataagtagtaactagtaaaatagtaaataataagatgattacagtttcaaacgtttcggtacagtttggtaaaagagtgttgtttaatgacgtaaacctgaagtttacaagtggtaactgttatggtattatcggtgcgaacggtgcgggaaaatctacgtttctccgtacgatttacggagatctggaccctacaacaggtacgattgcgctcggaccgggcgaacgtctctcagtgttgagtcaggaccactttaagtgggattcatataccgtcatggataccgtcatgatgggacataccgtgttgtgggacatcatgaagcaacgcgaagaattgtatgcaaaagaagatttcacagacgaagacggactgaaagtatccgaattggaagaaaaatttgccgagttggacggatggaatgccgaaagtgacgcagccatgttgctgagcggattgggcattaaagaagacaaacactatacattgatgagtgaactgagcggtaaagaaaaagttcgtgtcatgctggctcaggcgttgtacggaaacccggacaatcttttgctcgacgaacctaccaacgacttggatatggagacggtaacctggttggaggaatatctttccaatttcgaacatacggtattggtggtgagtcacgaccgtcacttcctcgactctgtatgtacgcacaccgtagatattgactatggaaaaatcaatatgtttgccggtaactatagcttctggtacgaatccagccagttggctctccgtcagcagcagaaccagaaggcaaaggcggaagagaagaagaaagagttggaagagtttatccgtcggttcagtgcgaacgtagcgaagagcaagcagactactagtcgtaagaaaatgcttgagaagttgaatatagaagaaatcaaaccttcttcacgtaagtatccgggcattatttttactcctgaacgcgagccgggcaatcagattctggaagtttccggattgagcaagaagacggaagaaggcgtagtgctcttcaacgacgtgaacttcaacgtagagaaaggtgacaaggtggtattcctgtcacgcaatccgcgcgcgatgactgctttcttcgaaattatcaatggaaacatgaaaccggatgcaggtaccttcagctggggggtaaccatcaccactgcttacctgccgctggataacaccgatttcttcaataccgatctgaacctggtagactggttgagccagtttggagaaggcaacgaggtatatatgaaaggcttcctcggccgtatgcttttctccggcgaagaggtgctgaagaaagtaagcgtactctccggaggtgagaagatgcgttgtatgattgcccgtatgcagctgcgtaatgcaaactgcctcattctggacactccgaccaaccatctggacttagaatctattcaggctttcaataacaacctgaagacatataaaggaaatatccttttctcatctcatgaccacgaatttatccagaccgttgccaaccgcatcatcgaactgacaccgaacggtatcattgacaagatgatggaatatgacgaatatatcacttccgaccatattaaggaattgcgggcgaagatgtacggtgacaaattgtaatttcaccacggaggacacggaggacgcagaggttgttattcagaaataattagagtctctgtgtcctccgtgtcctctgtggttgttctattatgatacttcttccatcagcaccagctcccagcttctccatacgaccgttgtcagtttcagtttccctttctgacgggcttccgccacacattcgtccttgctataacggatcagctgctcccgcgcttcatctacaatcaatctctttaggtttggctccgtgcaatatcaatgacttcatgcagtagagcaccatgtccgagttgaacatacaatccgttaatttattttcaccgaagcaataattgtcatagtttggtttcatcattgccaccgtgtcgtctatggacataggaagaactccttgttctttataatacgccagcatttcccgcagctccttctcgctgaaccccaccaggtcgttaaaccagggatcgtttgtgatattcgttcctatgttgaatccgcttgtcacgtcgtccatcgttaccgggctgactcccgtgataaacagtctgttgacggcggatcccattcccgtggtggcggctttgattacattgaagaatctccggatatacccttcaccatgcatcgctttccgatataagtccattccgtaagtcgataggatggtattcgtgaaattatcgtattcatcgatcagtagatatattttgatgtcccctttgcgggtggcgtaagtgttgatggctgataaaaaagcgccgggctcttcttttgttttttcatccagcactttccagatgttttttcccagcaaatgttcgtacctgtaaacaaaatcagaaagcttcccgcagcaatgcatccggaaagattcctccacctcattgatatttcccgaagcgtcggggcggatgaggaagagataagacggctgcatttctatcttttcgataaacattgtcttatccacataataatagttttctttttggatgcgtccgaaatccgtcaatccgtatggtatttgtttcatcatatcgcgattcccttctttaattcatatcgaagcaaatatacggaaaacgatgaaagggcatttttaaagctacttatttattcgtttatttgttattttgtaagaaaacagctatttttatctccattgttgagttttgattagtttttatttgccaagaaactccactgtatacttcactgcttcattgaaagctgtttcttgaccgggcacagtgataaacaaatgcactgccgagggaaattcgagtcgggtagcatttacgccaagagaggtgatacggtcgataaactctttcccttgacaagccaggatatctcgtccggctgcgataaggagtgtgcgaggtagttttttcaaggttttgtctgtagccgacatgggggatatttccggattgtgtatcctgtcgggtgatggttcataactttggttgaacgcttccattaagtctccgtccagcccgaatcccttgtcgtacttctgccatgaaggggtatggtcattccatgccttcacaacgggatagaaaagcaaaagccccgctatatccccttcgttcattctcaatgtggaagaaatggcgagattgccgccggaactatcaccgcctaccataatccggttgggagaacatccccaacgggctgcattctttattgcaaatctgatagcttcctcacaatcgtcaagcggtgtcggataagggtattcgggggataaacgatagtcaacagcgaggacacttatgccgcttctagaacagacttcgctgcaaaaccgggcacaactgttcaaactgccgattgtccatcctccgccatgcagatagataagcaatgtattgttggtggaagtggtaggggtgtaaagcctcagattaccggcgggctctgtcacttttacatttgcgggataagtaggtttgctattacgcgtatttcttacattttccaacttcttcgtatttccgttgatagctgtaaatatagcgtcacgctgtgtgggttgcagcgtcggactcatctgtgccatgaacgcatctgcctctttccacatcactgagtctttgggctcgtcagcgacgggtatccccatgagagataccgccattatcgttgttagaatcatttagttcttataaatcaacttgctcggcactccttcgccaaacaaactgtctccgacggtcgtaatcttatctccagtagccactacatagcgaagattgtcgcatcccataaatgcgccgaactcaatagccgtcacaccggcgggaagttccaatgtgccgcacagacggccgcaattactgaatacacgttgaccgatggatttcagattgcggggtagttttattttcagcaggtattttttctgtgagaaagtgaagtcggggatggccgttgcgtttgtttttgaaatgtcgaccgctaccagattcggcatatagtcgcgaattagtttgaaatcggcgttgtctagtttgccttctacagtcaggaaattgatgtctctaggttgtaatccggctttcagaatctcttcttccaatttgcccatcagtcccacttgcagggttgcttctaccggttcaccctcgatgaaagcgaagttctgccatctgtccttattacggtaagaatcgctgctgcctagaggtacgaagattgcggtaacgctgtccgccaacgcttccggcaacagattgggggctgtctttttgcgaatctgacagattctcaagttttcgcaacctttgaaggctgcatcctctatgtttttggttttttccgaaagtattatcttctccaacgtctttttgcctttggttactccgtctacaacatttgagaatgcgtatgcgggaatgaaattcggcatataaatgtagaatttcccgttgggataagtgcccgccttgccgctgtacatcttaatctcggcattcgagatgtccaatacttttagactggcgaattcgtcacgcagatgtcggaagtcttctgcattcagcttgccggtcagggtgagatgggtgacggtgttggcttcctcctccgtcatcatggaaataagtgtgccgggtttgcttacataataggttttactcacttgtgctactgctcctaaagcgttggttgccaataaaaagcttatcaatagtagtttaattttcataatcatgcgaatttgttctgacaaatataggaaaaaacgaaattatatggtgtttttttatgttttatatctaattttgcaggtggattaacaaattgtaaaatgacggcagaagatattgtggagaaaaaagaacctaagagacttcctgtatgggcgtgtatcccattgtttataggaatatttttcatatttatgggattgtacggcacgctggcgagaggatttttgtcgatggtgcttggagtggaagcccgtcatccgggattggtggggtatattttactggaaagcagtatgctgctggctgttctcactgccgctgctatcatgttacgttttgaacgctgtccgttctctggcttggggctgtccgtcagaggacatacgaaagggttgtggtacgggtttctgatggctgtcctgttgtatgtggtaggcttcggtctgtcgttggctatgggcgaagtggaagtaatcggttttcagttcaagacttgggatttggcgggagcgtgggtgtttttcctgcttgtcgcggtgtttgaagagattctgatgcgtggctatatattgggacgtttattacatactcgtctgaataaattcctttccctgtttatctcggcatcgttattcgcattcctgcatatttttaatcctgaaataaatgccttgccgatgatcaaccttttgctggcaggcatgttgctgggtgctccttatttatatacgcggaatctttgtttcccgatttccctccatcttttctggaattggatacaaggtccggttctgggctatcaggtgagcggcaacaattttgtatctactatgctgaaactgaatatgcccgaaaagaatgtgctgaatggcggagccttcggttttgaaggctcgctcatttgcacggtactgatgattctgtttactgttcttattatctggtggggtgaaaaaagaacggcgatcagtcttgcggtacaccgatcatgctaagctgaatccgtttgcggtcggtatctacgttcatcactctgaccatgacgtgctggtggatggaaacgatttccgtaggatcggaaatgtaacgttccgccaattgggagaggtgtacaagaccgttctccttgatacctatatcgacgaaagctccgaaattggtgatgtttcctacaatgcccggaagaatcataccttcgcgcaaatcggctatggtacgtacatttttgtcgaactcaaatactttgatggtttttcgcgggtcgcgtccgggcttttcgagttcctgcataatatcctgtaaggtaggcaggccgacgatgggagtgacgtaattggagatattgattttccggcggagttccttgtcggctatcaactcattgacagtgcatttcagatcttttgccatctgttccacaatatggtaactttccggatgcacggccgtattgtcgagcggattctttgctccgggaatacggaggaacccggcacactgttcgaaagctttggcgcccatacgcggaactttcatcagttctttgcgggagttgaaggctccattctcggcacgataattgacgatattttgcgccagttgaggacctaatccggaaatgtaagtcaacagatggctactggctgtattcaggttcactcctacgaggtttacgcaattttctacggtctggtcgagcgctttctttaatttcgtctggtctacatcatgctgatactgaccgactccgatggacttgggatctatcttgactaattccgccaacggatccatcagacggcggccgatggaaacggctcctctgaccgtcacgtcgtagtccggaaattcgtcgcgggcgatcttggaagccgaatagatggaagccccctgttcgctgactacaaatacaggaatctgacgatcgaatgtctgttggttgataaagtcctccgtttcgcggctggctgttccgttgccgatggagatagcttcgatctggtaggcttcgaccatcttacggagtttcgaagcggcttcaccggtcttgccgaccggaggatgcggataaatgttttcattatgcagcagattaccttgagcgtcgagacaaacaaccttgcaaccggtacggaaaccgggatcgatggcgagtacccgcttctgtcccaatggggcggcaaggagtagctggcggaggttctccgtgaagacgcggatggcttcgtcgtcggctttctcttttgattgtgcggcaaattccgtttcgatggaaggtttaagcagacgtttgtaggcgtcgatagcagcctcgctcacttgctcgctacattcattgttaccacgtacgaattggcgttccagacgttcgatgcacgcctcgtcgtccgaagtgatggacactttcagcagcccttcggcttcggcacggcggatggcaagcaggcgatgggaagtgcagcgtttcaaaggttcggaaaagtcgaaatagtctcggtatttggcggcctcttcttctttgcctttaactactttagcgttgatttccgcttggcggctgaattgattgcggacagcattacgggcacgttcgtcttcgttcacttgctcggctatgatatcgcgagcccctttcaacgcgtcttccacgtcttttacctctcccttgacgaatgaggcggcacgggcactcaggttgttttccctctgtaatagcagtagggtggcaagcggctccaaccctttctgacgggcggcttcggcacgtgtcttacgtttgggcttgtaggggaggtagatgtcctccagttctgtcggattccaggtgtcgttgatacgtttctccagctcggcggtgagttttccttgttcggtgatggtgccgagaatagtctctttccgtttggctatgtcgcacaacttatcatattgctctttgatctgttctatctgaacttcatccagcccgcctgtagcttctttgcggtagcggctgatgaaaggaatcgtagcgccttcacccagaaggtggagggtactgcttatttgtttttccgatatgcctgacagtccggaaatcatcttgtgaaataattccataaattgtattttttgagaataaatgagcgacaaaaatacacattaatctgttaaaaccgacaagttttgctatatttgcaacctaaataaataagtaagcacatcaaaactgcataactatgcccagatattcaggatgtctttttgctttcttcctttggctatccctgtcaatggaggtccttgcaacctctaaggatatgaatcctattctaattatttgttcctataatccggctgcccatcagacttcagttactatttccgattatatggagggatataccagattgggagggaaacgtgatattattattgagaatatgaactgcaagagtttctcggaagctcctttatggagtggtatgatgacacaaatccttgctaaatatcagggggggaagcagcaaccggcacaaattatattgttaggacaggaggcgtgggcggcttatctgtctcaaagggattcgatgcgggtgaaagttccggtaatgtgtagtctggtcagcagcaatgtcgtgatattgccggaggataccgttggagatttggatagctggttgcccggatctgtagatatctttgaagatcatatgaatattcctgaattgcagtcgggatttatcaatcattataatataggagataatgtgcgtatgattcgtgcgttctatcccgaaacaaaacatattgcttttatctcggataatacgtatggcggcgtcacgatgcaagcgttggtgcgaaaggaaatgaaaaatttccccgatctggatcttattctgttggacggaagaaaacataccatttatacgattgtagaggaattgcggcatttgccggagcatactgttatcatggtgggcacttggcgggtggacatgaatgaggggtattttatgcggaacgccacgtatgcgatgatggaagcggctcctgccattcctacctttacaccttcatcggtgagcctgggacattgggctataggaggtgtattgcccgattatcggaaagtgggagaagagatggctatggaatctgtccggatggataatcagtccggcaacgcggaaaaacatctgcagattattgaatctaaggctgtgatggacagtaggaaagcgaaagaatggggattggatccgaaggctttgccgtttggcgtggagctcatcaatcaaccggtttcattctatcagcagtatacgtatcagatatggtctgcttgcactttgtttgttgtattggtgttggggctgtttatttctctcttttattatttccgtacgaagcggttgaaagacgagctgttgaggtcggacaaagatttgcgtgtggcgaaagacagggcggaagagtccaaccgactaaaaagtgctttcctggcaaacatgagtcatgagatacgtacaccgctgaactcaattgtcggattctcggatgtgttggctgtggaaggaagtacggaggaggaacgtcagtcctattttcagattatcaagactaattcagatttactgcttcgcctgattaatgatattcttgacctttcgcgactggaggctaaccgggtgacgctaacttgggaggagtgtgatatcgtactgttgtgtcggcaggtggttgcttccgttagtttttcacggcaatcttcggacaatcagtttctgtttaccacttcttttgagacgtaccggatggagacggatatacagcgtatgcagcaggtgattatcaatctcttgtcgaatgctgataagtttacgaaaaaggggaagattacattggacttttctgtcgatgaaaaaacgggaatggcggttttctcagtgactgacaccggatgcggtatcccgaaagaaaaacagaaacttgtgttcgaacgctttgaaaaactgaatgagtatgctcagggaaccggattggggttgtctatctgtaaattgatcgtatctaaatggaagggagctatatggattgatcccgactatacaggcggggcacgatttatattctcgcatcctctaaaaatagaaaaagaatgaaacgaataacattgatttatgcttggcttttctgtctgacactgtccgttgcagcacaggaaaaggtagtgaagttgaagattgtacagacaagtgatgtacacggaaattattatccttacaattttataacccgtcaggaatggaaagggagtctggcccggatatactcatttgttgagaaggaacgccgggagtataaagataatctgatattgctggataatggggatattctgcaaggacagcctaccgcttattactataattatatagataccgtgtctccgcatctttgtgcggagatgatgaattatatgaaatatgatgcgggcaatatgggaaatcatgatgtggaaactggacgtgctgtattcgaccgttggattgaaacctgtgactttcctgtactgggagccaatatcattgatacgtctacggggaaacctcatcttcctccttataaagtgttggaacgggacggggtgaagatcgtcgttttggggatgattacaccggccgttcctgcctggctttcggaaaatctgtggagagggcttcgttttgacgatatggaggagacggctcgcaaatggatgaagataatccgtgtaaaggagaatccggatgtggtaatcgggttgttccatgccggacaggatgcgtttaagatgtccggtaaatataatgagaatgcgtctctgaatgtggcaaagaatattccgggattcgatgtggtattgatgggacatgatcatgcccgcgaatgtaagaaggtgatgaatgttgccggagattcggtgttggttattgatccggcaagcaatggagtggtgctgtccaatgtcgacatcactttgaagttgaaggatggcaaggtactgagcaaggatattcaaggggtattgacggagacaaaggattatggtgtcagcgaggattttatgaaacgtttcgctccgcagtatgaggctgtgcggaagtttgtgtccaagaaaatcggtacgtttactgaggatatctctacgcatccttctttcttcggtccttctgctttcatcgatctgatacatactttgcagctcgatatcacgggagccgacatttcttttgcagcaccgctttcattcgatgcggaaattaagaaaggggatgtgttcgtcagtgatatgttcaacttatataagtatgaaaatatgctgtacgtgatgactttgtccggtaaagaaatcaaggattttctggagatgtcttatttcatgtggactaaccggatgaaatcaccggacgaccatttgctgtggttcaaggaaaaacgtcgggatggtgcggaggacagggcttctttccagaatttcagttttaactttgattcggcttccggcataatctatacggtggatgttactaaaccgaaaggggagaagattacgattgtcagtatggcagatggctctcctttcgatataaataagatttataaagtggcgttgaattcttatcgtggtaatggtggcggtgaattgttgacaaagggttcgggcattcctcaagagaaattgaaagaccgtatcattttctctactgataaggatcttcgtttttacctgatgaattacatcgaggagaaagggggaatgagtccgaaagcgttgaatcagtggaaattcgttccggaggagtgggctgttcctgctgcccggcgtgacgctgaatatctgttcggggtggtcaataagtagccaaaaatgttcattttgtctggtgatactctgttttgacttgtatatctgatttattgctggtatatttgtcgcaaaaagagagagagtatggatattcaaaatgttcctaaagtaggtatttcttctgtagttcattctaaacatatagatgctgatagcattgatgtcattgataatgatatagcgctcttcgattcggagagcgttatttccttatatagcggtcccagcaagttagaggtattgacaataggactttgcctggaaggtgaggggacttttaatattaatctgcaggattttcaattatcttcgggagggatggtgatagccctgccgagccagattatagaacaccggcagtttagtcccgacttcaagggaatcttctttgcggtatccaagagtttgctggagacattgcctaaagtaggcaatctgcttgcattgtttttctatctgaaagattatccttgttttagcctgactccgaacgagcagcgcacggtgcaggaatatcatacgtttatcagaaagaggttgaggagtaaaggggatctgtatcgcagggaggtcgtgcttggactgatgcagggtttcttttttgaattgtgcaacatttttaacaatcatgcgcctgcagtcactgcttcggtgaagtcgaaaagccggaaagagtatatctttgaacgtttctatgaaacgctggtagaatcttatcaatcagaacgtagtgtgaagttttatgctgaccagctgtgtctgacaccgaaacatctttccggagttgtgaaagaggtgagtggaaagaccgtgggcgagtggatcgatgagtttgtgatcttggaagcaaaagcacttctaaactcctcaagcatgaatatacaggagatagctgaccgcttgagctttgccaaccagtccttcttcgggaaatattttaagcattatacggggatgtctcccaaagaatatcggaagaaccgataatgtgtttacagaactccggagcgtacgcggctcaaggtctccggtgtcatcagcaggtaagaggctatgtgtgccaaaggagcgcgtttgatgatttccggatgtgtctcgagcaggagattatagcgttcgcgggcggattcaaagcgccaggagtcagctttgacttgtgatacaattaaagagtattccaatattttctgatagaacatattgatttcccaattttctctcgccagcttctgtatcatgtcgcgggggaaaaggtagataatggaaggttccagtgtctccactataagccgggtaggtacttgcttcaagaaactttcaatgcacatcacgatacatccttcgtaagagaaatgctcggtaacgtctttcccgtttttgtagtagtattgtctgagcatacctttaccgacgaatacaatctcgtgagcgacctctccctcattcagtgcaatggctcctttgggaaactcttcacggatcagtatactttctatctgccgtcttccctctatactcatttccggaaagcgggaatttacaacggcattcacagtttctcttaacaatgtatccatgtcttttttgttttggtgtgtgcaaaaatactaaaaacggttgatataaatcaattgcagcacaaaaaagatgtatatttgttattaaatcaagatatagaaaagattatgaataagataataggattagcagtattgctgctatgcgtttgtggctgtgcgaaggatgatgatgcgatttattatccggtaggcaatgtggatattgaaaggggtgatgtcgctctggaagatggaaagggagaattggtagccgggggttataatgaggaggattatgtgctggatacgctggcgcagtatccgggagatcctactcttggcaaactgacgtttatgattgatctgaagaatcagttggcgagacaggaagctggcggatttaacggaatcggtaaatcgggattgacaatgagtctgggatataagaatggtgactatccgtcggaaagtcagatacctgtttatacttctcctgatgtaactgctgcgtatgcggttaaactccgtttaaaaggggagcttgctttggcaggagatgaatggatgattgattacatttatgtgcaattggctggcttatttcaaccttatccgcctgcgtcctttcctgaagtgtttatgtgtaaaggtggtgagcagccatttgctgcttttgactcttttcgtaggacttggacatttgatattacttacagccgttccggtctttctttcagtcagttatatttcaatttattcttgaatttggcagggcagaaacgggaagagagaattaggttgaggattgataaagaatctttctttgaggtgtataaattaaacgaggaaatgaattgattcatttcctcgttgtgtagtgggtacgagaatcgaactcgtattacatgcgtgagaggcatgtgtcctaaccgttagacgaacccaccggattttgattgatttaaaaagagctaagtcttaaaatacttagctctttttattttgagattttgcggaagctgggggattcgaacccccggtacccttacgagtacgtcagtttagcaaactggtggtttcagccactcacccaaacttccttgaacccgcattctctctcaaatgcggtgcaaagatagggggaagtttttgactatgcaaatcttttagcaagattttttttacttgtttttcaataatggagataaccctctatgtttcaaatgttaaacgaaataattttttttcgaagttttttagggcttgtttcatttctattcagaaacgttcataaaatgccgctataagtaaaagatgcattggatttattgaataaaagaggggagataatgtaggtgtataaaaaaaggctatctatcccagacagccaatctttttgttaaccttaaatctaatactatgaaaaacacattgcaaatatacggacttctgtgatatctgcaaataatacaagaaaaaacggatgttttataacattgattaaatgtttacttcttatattctatttttattaagactttgggtacttggaatgagctgtgcacggtattataccattaaatctcaagcgtggggatttgcccctataagtaggtaatttcctcctgaaaagtaggatttttcagtttcaaggggaaaattcattctatacttttgtcatatcgaaggataaatgatagatattaataaacgaatcattaaaaataaaggaatatgaaaacgaacacatttaaatatttaggtctggctttgatggctgtattgatggtcggtcttacttcttgcgaagtggagatagacagtttctacgatgatgataataacggaccgggttattacaaccgttcggccgatttgtgtagccgcacttgggtcagtttttatcgggatatagacaacaactactgctgtcaggaactggatttctttttagatcgtacaggaatagactacatacgggtggaatatccggacggatatgtggaagaatttgaatataagttccgttggagttgggaaaatttcgcgcaaacttccatccgtatgtcgtatgggcccaatgatgtttcctacctggacgacgtatatattggaggcaacaggttgagtggctatctggatgggcggaataattttgtggaatatcaaggaagataagaaagatgatataaagaatatcagcacgaggcatgagtagggcgtaaaatgaaagcataaaagttttgaatgggactaaatagtttttatctttgcgccctgttagtttgaaaatacatggagtggttatatagtctgtttctcgaacattctgccttacaggcggttgtggtgttatcgttgatttctgcggtaggtttaggcttgggaagagtgcatttctggggagtatccttaggagtcacttttgttttttttacaggtatccttgccggacatctcggactttcggtagatcctcagatgttgaattatgcggaaagtttcggtttggtgattttcgtttattctttaggtttacaggtcggtcccggtttcttcagttctttccgtaaaggaggagtaacgctgaatatgctggcattgggagtcgtcctgttggggacattgttgacggtcgtagccagctatgccacaggtgtctcacttcccgatatggtcggtatcctttgtggagcgacaacgaacactccggcgttgggagctgctcagcaaactctgaaacagatggggctggagagtagcacacctgctttgggatgtgcggtagcctatccgatgggagtcgtcggtgtgatacttgccgtcttgttaatccgtaaagcattggttcgcaaagaagatttggaaataaaagagaaagatgatgcgaacaaaacttatattgcagcgtttcaagtacacaatcctgctattttcaataagagcattaaagacatagcacatatgagctacccgaagtttgtcatctcccgcttatggcgggacggacacgtcagcattccgacttccgacaaggtgctgaaagagggagaccgtctgttggttatcactgcggagaaagatgctttggcgttgactgtacttttcggtgaacaggaaaatacggattggaacaaagaggatattgactggaatgcgattgacagcgaattggtttcacagcgtatcgtcgtcacccgtcccgaactgaatggaaagaagctgggatcgctccgattgagaaatcattacggcatcaatatcagccgtgtctatcgttcgggtgtgcaactgctcgctactccggaactgatactccaattgggcgaccgactgacagtagtaggggagaaagctgccatcctgaatgtggaaaaagtattgggtaatgccattaaaagcttgaaagaacccaatctggttgttatattcatcggaatagtattgggattggcattgggagctattcccttttcaataccgggtgtcagtactcccgtgaaactgggactggccggcggaccgattattgttggtattcttttggggacattcggaccacggatacacatgataacctacactacccgcagcgcgaatctgatgttgcgtgccttagggctttccctgtatctcgcctgtctgggattggatgccggagctcactttttcgacaccgtattccgtccggaaggtctgctgtggattgctttgggagctgggctgactatcatcccgacagtattggtaggttttgtcgccttcaaaatgatgaagatcgattttggtacggtatccggtatgttgtgtggaagtatggccaatccgatggcgttgaattacgctaatgatacaatacccggtgataacccttctgtggcttatgcgacggtatatccgctctgtatgttcctgcgggtgattatcgcacaagtacttctgatgttcttcttgggctgaaaaatgaaactttgaataaaaaataataaccggataaataaaaaagtattatatttattgcgaataatcgaaaaacgtaagtttggagattagaacaatggattgtgagccgataaatggtaatttgattttagtaatttgtaattaaatagaaatgactgctcaaagtaacataactcctgaaagcattgtgaacgatctgcgttatctgcaactgctttcccgaagttttcctactattgccgatgcaagtacggaaataatcaatctggaggctatcttgaacctacctaaagggacggagcatttcctgacagatgtacatggtgaatatgaagctttccaacatgtgctgaagaatgcttccggtgcagtaaaacgtaaggtgaatgagatattcggcaatacgcttcgcgaggccgagaaaaaagagatctgcacgttgatttactatcccgaagaaaaacttcaactggtgaaggcccgtgagaaggatttggacgattggtatctgatcactctgaaccagttagtaaaagtctgtcagaacgtatcttccaagtatacccgttccaaggtacgtaaatcattgcctgccgaattctcgtatatcatacaggaattgttgcacgagtcatctatcgagccgaacaagcatgcctatatcaatgtgattatcagtacgattatcacgacaaagcgtgccgatgattttatcattgccatgtgtaatctgattcagcgtttgacaatcgattcacttcatatcgtaggcgacatctacgatcgcggaccgggagcgcatatcattatggataccttgtgcaattatcataatttcgatattcaatggggcaatcacgatattctgtggatgggcgccgcttccggcaatgacagttgcatagccaatgtgatacgtatgtctatgcgatatggtaatctggctacacttgaagacggttacggaatcaatctgctgccgcttgctacctttgctatggatacttacgctgatgatccttgcaccattttcatgccgaaaatgaattttgccgatactcattataatgagaaaacgttgcgcttgattactcagatgcacaaggcgatcactattatccagtttaagctggaagccgagatcattgaccgccgtccggagtttggaatggcaaatcgtaaattgttggagaagatagattttgagcgtggtgtctttgtctacgaaggtaaggagtatgcccttcgtgacacgaactttccaacggtagatcccgccaatccttaccgcttgacggatgaagaacgtgagcttgtggataagattcattattcatttatgaatagcgagaaattgaagaagcatatgcgttgcctgtttacttacggcgggatgtatctggtatccaactccaatcttctttatcacgcttccgtgcctttgaatgaggacggtagctttaagcatgtcaagatacgcggaaaagagtattggggacacaaacttctggataaggccgatcaactgatccgtactgcctacttcgacgaagagggagaggaggataaggaatttgcgatggattatatttggtatatgtggtgtggtccggatgcacctttatttgataaggataagatggctacttttgaacgctatttcctggaagacaaagaaatgcataaagagaagaaaggatattattatacattgcgcaatcgggaggatatttgtgatcagatattggccgagtttggagctttaggccctcattcgcatataataaacggtcatgtgcctgtgaagactattcaaggagaacagccgatgaaggccaatggcaaactattcgttatcgacggaggattttccaaagcctatcagccggaaacgggaattgccggatatacacttgtctaccattctcacggtatgcagcttgtacagcacgaaccgttccagtctcgtcagaaagctatcgaagagggactggatatcaaatctaccaatttcgtattggaatttaattcgcaacggatgatggtgaaagacaccgataagggaaaagaattggtaactcaaatacaggacttgaagaagttgctcgttgcttatcgtaccggtctgataaaggaaaaggtctgaatgaaggttacttctttgccatgtgacattcaataattttcagtgcaacgagtggttcgttccacagttattatcttttagttccacagttgtttccctttcgttccatatttggggatattcagtaaatgttcctctttctaaaaaatcaagagaaaagctcacgtaaagcaaagcttttctcttgattttttcgttcaactctcccagtcttctatcttttttgtagaatattgtttacatattcttgttttttccttcccacccatgcattatgtacatgtcttttttaggggaagttaaaacctctcctgtttttcctgttattttagtcagattatgctgcctttctttttttcttttcgaccttttctatcatacataccgcattggctgtatgtatcccaaagaaaatccaaagtacttccgttttcctgtttctagcttttatcctggccagtgagtaatgttgtttctgcgttccaaaacttccttccaggcgggtagctctttcgcggctgagttccgaccgtaagattctccgaagcggctcatctttggcagctctgcccttacgcttaaaggaagtacttatatgatattttgtacaaaatttccggttggcattattggcatagattgaatccgccgcaagcgccttaaccctaaccccggtcagttgttgttgcagatgaatacagtctttcaaacgtactccttcgttaaaagccttaaaggagatatgttctataaaggagattccgtctatctgtatattgttgactttggctccgaattcaacggatttggtttccttgcctctgataatggggcgaaggtaatgccggtcgatactcacgatacggttggacacttttttgcctgcaaataaattcttcccttgctcaaggactgtctgtatgaccgagaaacgtctttggtaatcagaggatagtgcaagcctgttcctgtaggatgaatgaagctgctccagctggtcaagtaacttttccaataattgaagtaaccttcgtgtaatcatacgagtctgtgatttcctgcgtttacgcagtttgctataagcaagataggcacggcgtacatcaagatacttgttacggggacgttgtatgtgcaatgtacggcaatgtttgcacagatgacgatgaagccatacaataccttcccataagagtttggcatcagtaggaaaacgcaggtgactttcataacaggtggcatcggtcatacagacatgaaggttctcaagataaggtttccaatgctcggcaagaatgaactggagggactcaacatcaaggcgattcgctagttcctgacgaattgcactaacgattttaggattggttagtggatgaagcggatcaatctggacaccacaaaacaactggtaatgaatattaccgtttaaatgctcaatcagttgtgcatcggaaaagttggtataggacttcaagaccatcaaggctattttaccttcgggagaaaaataacttttacgacccaaagcagaggacttcaaatgcatttgtcgggccagttccgagaaagggaatagagaatggagtcgacctaattcactcgttgcaaaactttgacgatattttttaagcatatcgaactcggtaaaacctaaacaaggttcgatttctgagattttttgtatctttaccatgtgtttttattttagattacccccgttttggccgtcaaaccgttttttggggggaatgcttaaagatacaaaaaaggcaactaattcgcaatgaagtagttgccttaaattttattattttaggaatatccctatttgtggaacgaaagggaaacaattatggaacgaaatgtttttagtaaagcaagagaataaatgctatatatgcaggatttatattagaaaaggacaatgcctgcctctataatcgctcctttatcgtaattgccggatttattatagaatctggttaggccataaccgcccgttgcgaagataccgaatttcttggttagctgatattccagattagcgcgtgcttgtagcgcatatagacgtccgggaatcacttcatccttattgtcgaaagtttcgatatgctgataacctaagtcgccgctaatggataatcctttatagataggaaaagataatcctgcacgataggaagcgctcgccgaaaacttatcatttaatccctgatacatagatccggctccaagaatcgtataaaacaactgattcttgaaacgtaccccgatattggcaggagtcacatttcccccgtataccatcatctgtactttggtgtcgggattggcattaaccagtcccagctggaaacccttcaagtcttccctatagtaattgaccagaccaatctgaaggccgcgaacttgtgtggcatagttgcacaatgccatttgaactccacgtagctgtgtcccggttatgttggcgatacctgctatctgcaggccattcatattttcacctaccacattcagaagaccggaagtaatcatgccgttgaaactctgtccggtgatattcgccgcaccggaaaactgtaagcctgaagccatattcccggtaacattcataaaaccgctcatcataactcctgcggtattatctccaccgataccagtcagtccggatataaccaccccccgtgtcccgtctccggtaatatttaccagtccggctgcagagagtccgatcgtattgttaccgctgatattgcttatacctgctatctgtacgcctcgcattgtcccaccggccaggttagccagtcctgtaatctgtgcgccgttcatatctccatgaacaacacttcccagcgcattgatgcctacaccattcaggcgattcatagtagacaaaagaccgatattcacataagtcgtctgtgtactgtcatacggttgcgtacaaatatctttccagatagaaagattaataccggcacttttgttctgtgcaggcagacaaacggcagccatcagtatagctgccgtgagtattgttttcttcattttcatcctttagcctcctgatacaagtatcgtttgatactcttcttcggtgtcttttcaaactcttccgggtatatcttcatctttgaaatctggctgtacgccggtaacatggcattcaatgccacccggttttcttccatcacccgctcgatgtcttcattcttcaggccgtgtgcgaaagcgtcgtcgaaatccggataaaccaaaccgacaagtttctcattctgctgaacgataatgctttcggatacatacggcagattgtttaatttatcttctatctcttccggatagatattctgtccactggcgcccaacagaaggttcttgctacgtcctttgatggtaacatttccttcggcatccatcaaagccagatcaccggtatgcagccaaccgtctttgtcgatcacttctctggtagcttcctcattcttgtagtatcccagcattacgttaggacccttacaaacgatttcgccaacgatattttccgggtcggaggaaaggacctgtacatccatacggggtacggcttttccgcaagaacccggtttgaacctcctccagtcttcgtaacagatgatcggaccgcattccgtcattccatatcctacggtataagggaaatcgatcattttcaggaactgttcaacctcctgattgaaagcggcacctcctacgattaccgccttaaattctcctccgaacgccttaatcatctcttcgcgtaccgtagctttaatcttatcgttgatgataggcactttcagcaaaatcttcattgccggagtttccagtttcggaagtacactcttcttgataatcttttcgatgataagcggaacagcgacaatcagattcggttttacctcttcgaaagcctggaagattatcttcggactaggcatacgggtcaggaagtagatgtggcaaccgacggaaaattcataaaggaattcgaatgccagaccatacatatgcgccatcggaagcatagatacaatcttgtctccagccttcaagtcgagtacttcgtaggcgaacttcgtatttgaccacaaactgcggtaggggagcataaccccttttgagtagctcgttgttcccgaagtataattgatgacagccaactcctccggctcgtccttatgataagcgacgtgttctttacggaagtttttagggaatttcttgccgaacatctcgttcagatgctcgcgggcgtatgtcaggcgttcgctgcgtgaaaccagcaaagtgaagtcattcatcatcagaataccttccaatagaggcattgccgactcgttcaggttttcccataccatatcgcctacaagcagtaatttcgcttcggaatggttgacgatattgtggacgttgtccgccttaaattcatgaagaatagggacgataaccgctccgtatgtcaatgtggcgaggaacgtcacaccccaatgcgaactgtttcttccgcaaacggcaatcttgtctcccttgcggattccgctttcctcgaaaatgatatggagtttctctattttgcgagctacgtctttatactgtaaggtggcgcccttataatcggtcagggcatccagatcccaattattcttgatactattctcaatgtaagctataaaactttgttccattgttttttgcacatttgatattaaattgtgcaaatatagcaattaaattaagaatgaagaattaagagggaagaatttttgaaaatgggggaagggtgatgtagtgagattgcgacaggctggtaggaggaaagattatggtgatagctaatttcattatgctataataaaaaaatatgctataagcaaaacaaattctgcttatagcatattgacggattcttggaattccctatttcaagtaccattcgtacattctttgtacgccttcctcgatttcaattttgtggtgccaccccaaagagtgcagtttcgaaggatcggtcagcttgcgcatagtgccgtccggtttgctgctgtcgaaggtcagtttaccttgatagccgacagtttctacaatgcgttcagccagttggcggatagtgatttcctttcccgtgccgatattgatatggcagttgcggatgtccttgtcgccttccttatacgtgtctttgaagtccacatgttccatgacgaatacacttgcatcagccatttcctcgctccaaagaaactcgcgaagcggagtacctgtaccccaaagagtgacttccgtttcgctgattccgtatttttgcagaatagctagaatttcttctttcggactgtctccgttgacaccttctaccggacgcaggttcatatccttgcgtacagcttcccagttaccctctttcaggcaatgtgccagatggattttccggatcatggcaggcagtacatggctacgttccaaatcgaaattatcattcggaccgtagagatttgtcggcatgacagcgatataattcgtgccatattgcaggttgaaactttcgcacatcttcaatccggcgattttggcgattgcatacggctcgttggtatattccagcggagaagtaagcaatacatcttctttcatcggctgttccgcgtcacgcggataaatgcacgtgctgcctaagaacagcagtttcttcacattatggcggaagctctcaccgattacattctgttgaatctgcagattcttgtagataaagtcagcacggtagatactgtttgccatgataccacctacgaaagcagcggcaaggaaaacatattccggctgttcttcatcgaagaatttacggacagctacgccatccaatagatcgagttccttgtgggtgcggcctaccagattggtatatcctttatcctgcaaatttttccagatagcagatcccacaagaccgtgatgtcctgctacatatatctttgcattcttttccattctatcttttatttgttcactacagaggacacagaggacacggaggattttatgttttcctctgtgccctccgtgtcctctgtggtgaaatgaaattcatttaatgtttggtagcaatcattcgttttactttctccatatcgtggcgtaccatgatacttaccagttcttcaaatgaagtcttgcgcggattccagctcagcaaagtcttagcttttgtggggtcaccaagtagttgttcaacttccgatggacggaaatatttaggatctacttctaccaaagcctttccggtagccacgtcaatgcctttctcgttcacgccttcaccttcccaacgaagttcgataccggcttctttgaatgccaatgtcgcaaattcgcgcacggtgtgcatctcaccggtagcaatcacgaagtcttccggaacgtcatgctgcagaatcagccacatgcattccacgtaatctttggcatatccccagtcgcggcgtgcatccagattacccagatacagtttgtcttgttcaccttgtgcgatacgtgcggcagccagggaaattttacgggtaacgaaagtctcgccgcgacgttcgctctcgtggttgaacagaataccgtttacggcaaacataccgtagctttcacgataattcttggtaatccagaaaccatattgtttggctaccccatacggagaacggggatagaacggagttgtctctttctgtggaacttcctgcaccttaccgaacaattcggaagtggaagcctgatagatgcgggttttcttttccaatcccagaatgcgtacagcttcgagcatacgcaacgtaccgacagcatccgcctcggctgtgtattccggaacatcgaatgaaactttcacgtggctttgagcagcgagattgtagatttcatccggttgcacctgttgaatgattcggattaacgaactagaatctgtcatatccccataatgcagattgatcgtacgtttctgtttcatgtcgcgtacccactcgtcaaaatacaaatgttcaatacgtccggtattgaacgatgaagaacgacggagaataccgtgcacttcataacctttttgcaatagaaactcggcaagataagaaccatcctgcccggtaatgcctgatattagggcttttttcatacgctattatttaataaatcaaaaatatgggtgcaaatgtcggtattttttgtgacccatgcaagccacattctatttatttttcagcatggttattcagcacagtttttcccatcattttgtcgataatcagtgcgatagctccgtcaccggtcacattgcaggccgttccgaaactatccatagcgatgtaaagagcaatcatcaatgcctgtgccgattcatcgaaacccaacatggattgcaagattcccaaagatgccatgatggctccgcccggaactcccggtgcggctaccatcgtgattcccagcatgaagataaaaccggcaaagagtgggaagtcgaacggcattccctgcatcatcatcagtgccagagcacaggctacgattttcagtgtacttcccgacagatggattgtggcgcacaacggaatcacaaaaccggctatatccgccgaaacaccattctttttcgtctgttccagtgtcacgggaatagtggcagccgatgattgtgtgcccaatgccgtgaaataggcaggcatcatcttccccaatagtttgaacggatttttgtgtacaaacagcgctgcgatagaatactgaaagaccagcaggaagatatgcaaaatgaaaatgactccgataatcttgataaataccatcagaatggagtacacctgtcccgaatgagtcatattcaagaagataccgaagatataaagcggaagcaaggggagaattaccgcactgatcatacggacgatgattgcctgaaaatcccgtgctacgtttttcagagcatcgctgttcagcgaagccaatcccaatcctaatgtgaaagcgagaaccaaagctgtcattacgttcatcaatggaggaatggaaacggagaaataaggaagaattccttttgcctcgctcacttcctcaagcggcacgcccggttcaatcaatgacgggaataccgtgactccggtgaagtaagagaggaaccccgagaacagggtggcgaaataagcgataagagcggtgacgagcaacatctttcctgcgcctttaccgatgtcggcaatagccacagtgaccaatccgacgataatcaacggaatggagaaattaagaaattcactgaaaatgccgttgaatgttacaaatatccggacaagaggagccgggaaaaaagtgccgatggcgatacctagaataatagcaataataatgcgggctaataaaccgattttgattttcttcatccttgtttctatatagttaattgcaaaaataatattttaatctaaatatagcgaacaaatgtctgtttcaattgttactatggtaatcaatattacaaaatatacaagttatggcaaatcagaataaaacagatatcggacttataggcttggctgtaatgggcgagaatcttgctttgaacatggagagtaaaggatggaatgtatcggtttataaccgtaccgttccgggagttgaagaaggagtggtggatcgtttcatgaacggacgtgcgaagggcaaaaacattgaagggttcacagatataaaggactttgtagattcaatcgctactccccgtaaaataatgatgatggttcgtgccgggagtccggtagacgaactgatggaacagctttttcctctgctttcacccggagatattcttattgatggaggtaactccaattacgaagataccaaccgtcgtgtcaaactggccgagtcgaaaggttttcttttcgtcggcagcggtgtgtccggtggtgaagagggagctttgaacggagcgtctattatgcccggtggctcggaaaaggcatggtcggaagtgaagcctattcttcaaagcattgcggcgaaagcgtctgacggcactccttgttgtcagtgggtagggcctgcgggatccggtcactttgtaaagatgatccataacggtatcgaatatggtgatatgcagttgattgccgaagcatattgggtgatgaaaaacctgctcgacttgaataatgaaaagatggcagatgccttttcccgttggaatgagggcaaactccgcagttacctcatcgagataacagccaacatcttgcgtcataaagacaagaccggaggttatcttattgataagattttggatgcggccggacagaaaggaaccggcaaatggtcggttatcaacgctatggaactcgggatgccgttgggactgattgccactgcggtgtttgagcgcagtctttccgcacaaaaggaattacgccatcaagcttcccaccaattcccgcgccaacatacacaacctatatataataaggtggagctcgtgaaggatatcttctctgccctttatgcttccaaactcgtctcatacgctcaaggatttgccgtgttgcaacgtgcttccgatacattcggctggcagctcgatctggcttccatcgcccgtatgtggcgtggcggatgcatcatccgcagtattttcctgaacgatattgccgctgccttcgaagccaccgacaagcccaaacacttgttgatggctccttatttcagggaagaaatgaaggcgtcactctccggatggaagagccttgtagccgaagccatgaaagaagaacttcctgttcccgctttctcttctgccttgaattacttctattcgcttacttctgccgatctgcccgctaatatggtgcaggcacagcgcgattatttcggtgcgcacacctttgagcgtaaagacgaactgcgcggacagttcttccacgaaaactggacaggacatggcggtgacacgaaatcgggcacatataatgtgtaagtaggatgtctttcggagtaataagactattttatgaattaagaaataaaaagcgacaatggataaattcgcaatgataatttttggcgcctcaggcgaccttaccaaacgtaagttgatgcctgccctttactcgctcttccgtgaaaagcggttaacaggtgattttcatatactgggtatcggacgtacgatttattctgacgaggattatcgctcgtatatatcaggtgaacttcggactttcgtgaaatccgaagaacaggatgcggcactgatggaggctttcatctcgcatctgtgttacttgcccatggatccggcaaaggaagaaggatatgccatgctccgccaacgtctggtggagttgaccaatgaggtggatccggataatctgctgttctaccttgccactccgccttcactttacggtgttgttcccttgcatctgaaagctgcaggactgaatactccccattcgcgtatcatcgttgaaaaacctttcggttacgacctcgaatcggcacgtgaattgaataaaatttatgcttctgttttcgaagaacatcagatttaccgtattgaccattttctcggtaaagagacagcgcaaaatgtgttggctttccgttttgccaatggtattttcgagcctctctggaacaggaattatatcgactacgtagaaattaccgctgtagagaatctgggaatcgagcaacgtggcggattctacgaaacggcgggagctttgcgggatatggtacagaatcatttgattcagcttgtagctcttactgccatggaacctcctgctatcttcaatgcggataacttccgtaatgaggtggtgaaagtatatgagtctctgacaccgctgaatgaagaagatttgaatgagcatattgtgcgcgggcaatatacctcttccggtactaaaaaaggatatcgtgaagagaaaggggtagctcccgactcgcgtacggaaacatacattgccatgaagctgggtatcagtaactggcgttggagcggcgttccgttttacatccgtaccggcaagcaaatgccgactaaagtgacggaaatcgtggttcatttccgcgagacacctcatcagatgttccgttgttcaggtggcaattgcccacgtgcgaataaattgattcttcgtttgcaaccgaatgaaggaattgtgctcaagataggtatgaaagtgcctggtgcgggctttgaagtccgtcaggtgacaatggatttcagttatgcccagttgggtggagtgccgagtggtgacgcttacgcacgtctgatagacgattgcattcagggcgatccgactttattcacccggagtgacgctgtggaggcttcatggacattcttcgatccggtacttcgctattggaaagagaatcccgacgcaccgctttacggttatccggtcggtacgtggggacctttggaaagtgaagcgatgatgcatgagcacggggctgactggaccaatccttgtaagaatttgacgaatacagaccaatattgtgaattatgaaagtaactgtttttccctcgtccattgaaacttcacgtggactgatactccgtctggtggaaatcatgaataatgaaccggacagaatattcaatatcgcagttagcggcggcagtactcctgctctaatgttcgatttgtgggcgaacgaatatatggaaactaccccctggaatcgtatgtgtatttattgggtagacgaacgctgtgttccccccgatgattcggacagcaattacggaatgatgcgtaatctacttttaggaatggctcccattccttatgagaatgtctttcgtattcgtggtgaagtcaaaccggtgaaagaagcggcccgttattcggagttggtcaagcaacaagtaccgtccaagcagggatggccagagtttgatattatactgttgggtgcaggagacgatggtcatacttcctccattttccccggacaagaagaactgttgacttccgcttctgtttatgtagtcagtattaatccccgtaacgggcagaagcgcatcgcaatgaccggttatccgatattgaatgcccgtcacgttattttcctgataaccggaaagggtaaagctgatgtggtagaagaaatctgtaagtcgggagatgtagggcccgcagcctatgtagctcatcatgcgcagaatgtggaactgtttatggatgaaggagctgcgctatacattggcgaccgtaaataataaagagttcggaggagagttacacttttgtaatctcctccacgatgtatttatcttctacttttttacaagtacatacaaagtactccgggtgcttcaaggctccttgcaaagtatcaggaagaatgatctctttggttcgcctgtctactgctaccattgcatacaagataccttcacttttgcacttctcaataagtgcactttttaattcctctacgttaaattccatttatgtgagattttattgttgcaaagttatggaaattatgaatattttgtgcaataatattcttataatataaaatagctccctagttcgtccgctgacgagggagctatttaacacaaaaactaaactagacttaactaaactattctattctcggaatttcacaatccctttctgttcgttgcaaaggtagggataaaacaggttttggcaaactataatcgacaaaaatctcgtttttaccgataaaatagggaatcatcaacttctttcatcaaggaatgcttggaaaacctgtttgtaactgtcactgatggggatgtatgttttgtcaaaaacaatgcgtccacgatctattacacgtatcttatccttttgaacgatgaaagagcgatgcacacgtataaaacggctggaaggcaaaagttcttccatcgctttcatactcataagggacagtattggcttggaggcgtcttccgtatagattttaatgtaatcttttaatccttcgatatacatgattttctttaattccacttgtaccaatttgtagtcactttttacaaaaatactgtctatctcctctggcttctgaaccagttcgaaccattgaagcgctttgttggctgcctgtaggaagtcgatgtatgaaatcggctttaatagatagtcaagtgcgttgacacgatagccatcgatggcatactgtccaaaggcggtagtgaatacgatacgggtacgggaatccaccatttttgagaattccagtccgttaagttcgggcatttggatatccagaaacaagaggtcaacttcctcgccaggcaattctttcattgcctgaacagcgctggagtattttcctacgagttgtagaaacggggttttgtttgcataactttccaaaaggccgatagccaaaggctcatcatctacgattgcacaacgtaataccatactactattctattaatataaaattctatacttaacgttttctctctactctttgatcttaatgctcaattttgattcgtaacacttcccgtcccgtgaagtgcctttcgaccaagtgtaagcccccggataaagtatctccagccgtcggctgacttgttctaaccccacgcccgaaccacttttatcccacacttccttggggaaattactattgcggatttcgcagatcacttcttggtcgttctcggaaatatgaatgtggatgaaactagcttcggtaggggagataccgtgcttgaaggcattttctatcaatgaaataaagattagcggggcgatcagtgtctggcagtttgggtgaatatcgaattgagtactcatctgtacattagccgacaggcggatacgcatcagttcgatatagttacggatgaaatcaacctctttacagagcgggacatacgtctgctgattgtcatataatacgtatcgaagcaatttgctcagttcctgcacagcttgttgagctttgtccgaatcgaatgcgattaaagcataaatattattcagagtattcaacaaaaagtgagggttcaactgattgcgcagatttttcagttcggcttccgtgcgattccgttccgcttccttgcgggcagcctcgttttgcgtccatcgtgcgctcatacggatagcggcactcaatccgatagtgaaaacaaggcttagcatatctcgcaggaaaaacaaccatcccggaggcatacccggacgtctgggcttgttctcaaatgacggatcgaatgtcagactttgccagagatgaagcagtatcccgatgatacacaacaagataatgttgtagacaatatatctttttgattgattctgaaaaagatatcgggggaccagaaagaagtaattgacgtagaacacaatcataaaagaaagcggtacggcaaaatggcgtatataagccatccagttaatgttcccgtttccgcgttctacgaaaaagaacgggaaaccgaacataatcccccagctgataatgtgtatcagtatctccaggggacgacgtgcggatgtaaaggtttgtttcataaagacaaagatagctctttattcgtatctgatagcttcaatcgggtctaaatctgctgcttttttggcaggataccatccaaagaagactccggtgacggtacagacggcaaaagagaggaatacactccacggctggatatagataggccaatgcgccacgcttttgactatccaactggctccgcagccgatgaccactccgatgattcctcctgtgatactgatcatgatggcttcgataaggaattggctcagaatgtcgattcctcgtgcgccgaccgacattcgcagaccgatttcacgggttcgttccgtgacggatacatacatgatattcataattccgataccgcctacaaccaatgagatgctggcaatacaagcaagcagggtggtcattaaatcggtggtagagttgagcattgtactcaattcctgttgtgtacgaatggtgaaatcatcatcgtcagaggtctttaacttatgattgcgacgaagaatcgtgctgatttcatctgtagcgtattctgtcatatcttcggtgagggcggaggcgaagataccttgcagataggtaacggcaagcagacgtttcatcaccgttgtgtagggagcaagtactactgcatcctgatcctgtcccatagaattgtatccttttgacttgagcacacctaccactcggaaggggatcttgctaaaacggataatttttcccaccggatcgctgccgtcgggaaaaagattgtctactattgtctttcctatcacgcatacttttgccgagctttgtatgtcggcttccgtgaacatctcaccgttctccaccgttaattggcggatatcgagatattccgttccaaccccgttcacggaggcaggatagttgttgttgccggcaataagctgccccgatgaagagacattggggctgatggctgacaggaatttggtctcgtcacgcaaagcctcgtagtcggtgagctttaacgtttgcatggcagacggatcttggcgcacacctccacgcatatcggctccgggatgaatcataatcatgttcgatcccatttcggaaatttgttgctggatacttttcttcgaaccttgtccgatggcaagcatcgtgatgacggaagcgacaccgatgataataccgagcatggtgagaaatgcacgcaatttgttgtttgccaatgcgcggagagctatcttgaataaattggttccattcatgttgttagtaattagttatttcgttaaacgcggtctatccttcttcgtcattttttggtaatgcagccaatgcttcagtagcggatagaatttccggattagcggtatcctctatgacatgaccgtcgcgcaggcggatattccggctgctatattgcgcaatctccggattatgcgttacgaagatgatggtgcgtccttccgcatgaagtttttgaaagaggacaagtatctcaaatgaggtacgggtgtcgaggtttccggttgcttcatcggcaagaatcacagccggattgttgaccaatgcgcgtgcaatggccacccgttgcatttgcccaccggacatctggtttgatttgtgttccagacggtcacctaatcctacggcctgcagagattcgatggcacggcgacggcgttcggcggcactgacagaagagttgtacataagtggcagttctacgttttctacagccgttgttttgggcaacaagttatagttttggaacacgaatccgattttcctgttccgcaagactgcacgttgaggcttgctcatagtgcggacggggatgtcgctgagcagatattcaccgctcgtcggagtatccaggcaacccagaatattcagtaacgtagattttcccgaaccggaagtacccatgatagtgacaaactccccttcgtgaatggtgaacgaaacacctcgtaacgcatggacggtttcatcacctacctgaaagttacgcttgatattttgtatttcaattactttcttcatggtgtttgtcacttgttgtttttcttcttacttcccggagggccaggcatgaacgggcttctttctcctccgctctgttggttgggtccggcttccatattttcgcccggcatggcaccgatagtagcttccgtcacaattttagcgccttcggagataccactgataatttccgtcgacataccgttactgattcctatctctaccggatgggcagtgaatgtatttccttcgcgtgtccaaagtttatgttcacctttacagtcatttacgatgtcgttagcaccgattaagggtttttcgggtacgaaacgcaatgctttgttcggcacggaaagtacgtcttttttatcaaggatatagatggtgacattggccgtcagacgtggtttcagtttcaaatcgggattgggagcggagattaccacttcataagtaaccaccgtgctactactggtacttgtactgctggtactgcttgcatcgcccaaacgaatctgggtcacaacgccttcaaaggtatcattaggatatgcgtccaccgtaaaactggcgcgctgtccttcttctacgccacctatatcggcttcatccacatcggccactacctgcatctgcgtcaagtccgcagcgatagtgaacagggtaggagtctcgaatccggaagcgacagtctgtccggcttccacatcacggctgataacaactccgtcgataggcgaagtgatggtagcgtatgataagttacgctctgcctttgcgagagaggccttactgctgtcatagctgctcttcgccttctgatagttgtagagggcttgttcgaaatccgtgtcgctgatgagtgatttttcgtgcaagcctttgctacgttcatagtttttcttctgatattcatattcggctttcgcaccgtcgtatgtcgcttgttgcgaagccaattcactttgcagtgtgacgcggtccatttcggcaatcaattgtcctttggtgactgttgagttataatctacataaatcttgtcgatgatgcccgatacctgtgtaccgacttcgacttccgtcaccggctctatcgttccggtagcagttaccgaatttgaaatatcgcctttgctgacagcgacggtagcatacgtgactttatgcttggcgggtgaaccggtgaagaaccagattcctatacctactaccgcaatgactgccacggcgattaggataatctttttcgttttcattcgtttatgatgcttttaattaatatacgttgatttataatgtcaatttgtctccttgatagaatttcagcaactgtgtgtttagtatggccatatatttagcctgaagttgctcttgttgagcttgtagcaagttattcttttcggtgaggagctccaccgtatttttcatacccagattgaactgttcgctgatcaggtcatagctgatctgtgtacttctcagtttttcgttggctgccgcataacgttgttgtgcgctgtttgcgtccaaccaaagactttcgatggtcttatagagggctttttgttcgtcaagtaaggaaagcatatccgtttcgcgttgcagcttagctttttgtacagcactttttgtctggcggttattaaagataggtacactgacagacaatccgatggaattattccatccgtttttcacttgttcgccgaaagtgaaatcgcttccacttgtatggtttgtgccgatgcctgcgctgaggctgatagtggggaagtaactcgatttggcaatatcaatgcctagttcggaagcctctatattcaacttacttgcttcgatttcgggacggatggcaagggcgcttacatagacatcctttttggcaggtaacggagccagtacgttttcatcggacagtttagggaggtagacgttcatttcattctctccgtccagttcgagcaattgtttcagttgcaatttgtaatcttgtaaggtggcttgcgctgtgacaagttgataacggtctgtgcttacctgagcctctaactgtgcgaagtcacttttggcaatacttccggcattgagaagttcctgtccgcgatcacactgggcaatggagacttgcagtgtgttttcatttaccctgacggattcggcggcataaagaatctggatataaatttgtgcaatcgactctttaatcatattttccgaagtggctacatccaattcggctacctggttgttcagccgttcctgtttgagagttttgagtcgcttactgccgttgtatatagtccacgaggcattcaggccataattgccgttgtaacttgttttactgttgctgctgatgatttcgctgccactcacccggctgctcgtctcctgataggggcgattcactacttgctggctggtagagaacgaaaggctgggaaataaagccgctttggcagtctttacgtcaatctgtgtgctttccgcagtcacacggttcttgcgaatcgtaatattctgttccaaagcatagtcgatgcaagattgcaaatcccattgagcggggagtctggcttcatttaacgtatcggcttgcaacgaaaaatcttgtgcagatatgtcggaaagcatacctgcaccaagaaatgtcatcactgccaatcttcttacatttatcatattcatacttctattgatttattggtgacgaaggtacgcacatattatattagcggcaaaagtgatagacggatcattgaattttaccgttaaatgatttttttctgtcgatagggagattagccgggaaaaacacaataaatctcgcaacaattcgggggatttgtttgtttttattataaatattgtatatttgtactcattacaaattctaacaacgatatatgaagaatgcactgcttgccgtttggaacttttatttggaaggtttccgcagtatgacacttggtcgtacattgtgggttattatccttttgaaattattcgtcatgttttttatcctcaaattattctttttcccgaatttccttagtgatcaccctacggagactgaaaaaggagcgtatgtgggtaatgaactgatagaacgtgcccttccggagaaaccgattgatttttaacccttaaacaacataagattatgattgaaagtattgacacctcgctgatcgattggtcgagagcccaatttgcgatgacagctatgtatcattggatttttgttccgcttacacttggactggcagtggtgatgggaatcatggagacgctgtattataaaacaggaaatgaattctggaaaaagactgctcagttctggatgaagcttttcggtatcaacttcgctattggtgtagcgaccggtttgattctggaatttgaattcggtacaaactggagtaattattcgtggtttgttggtgacattttcggagcaccgttggcaattgaagggattttggcattcttcatggaagccacatttatagctgtgatgtttttcggctggggaaaagtgagcaaacgcttccatctggcttctacctggctgacgggattgggagcaactatttctgcttggtggattctggtggccaatgcatggatgcaacatccggtaggaatggagttcaatcccgatacggtgcgtaatgagatggtagatttctgggctgtggctacatcacctgtggctgtcaacaagttctttcataccgtattgtccggttgggtgctgggcggtgtgttcgtggtcggcattagttgctggtatttgttgaagaaacgtaatcgtgagtttgcacttgcgagcataaaaattggtgctatcttcggactagtggcatcgttactcgccgcttggacaggagacggttccggttatcagattgcacagacacagccgatgaagctggctgctgtggaaggcctgtatgagggtggaacgaatgtaggactagtaggaataggagtgcttaaccctgaaaaggaaacttatgatgatgggaaagaacctttcctcttccgttttgagataccgagcctgctttcttttctggcggaacgtgatgcggatggttacgttccgggaatcacaaacattattgaaggcggttatcaaatgaaagacggtacgacggctctctcggcagccgagaagatagaacgcgggaaaacggctattggggcattggcagcctatcgtgcggcaaagagtgcaggtcatgaagaggacgcgcaagtggcatataaagtgttgcaggagaatatcccctattttggatatgggtatattaaagatgtgaatcagttggttccgaatgttcctttgaatttttatgcgttccgtgtcatggtaattctcggaggatattttattttgttctttattgtagtattgttctttgtttataagaaagatttgagtaagatgcgctggatgcattgggtcgctttgcttactattcctttgggatacattgccggacaagcgggatgggtggttgccgagtctggtcgtcagccttgggcaattcgtgatatgctgcctacaacggctgctatctccaaacttgatgtgggttccgtacagactactttctttattttcctgttcctgtttactgtaatgttgattgccggtaccggaattatggtgaaggctatcaagaaaggaccggatacggaagataatatgaatactaatcattaattgtaaaggctatgtatatatttctacaacaatattggtggcttgtcgtttccttgctgggagctatcctcgtatttttattgtttgtgcaaggaggtaattctttgttgttctgtctcggtaagacggaagaacaccggaaaatgatggtaaattctaccggtcgtaagtgggagtttacatttactacactggtcacgttcggaggggctttctttgcttcttttccattgttttatagtacaagtttcggtggagcttattggctttggatgattattcttttcagctttgtattgcaggctgtcagttatgagtttcagagcaaagcgggaaatctgttgggcaaaaagacatatcagacttttctggtgattaatggagtagtagggccgttgttgcttggcggagctgtggcgactttcttcacaggttccgatttctatatcaataaagctaatatgacggatactgttatgccggtaatcagtcattgggggaatggctggcatggattggatgcactgacaaatatatggaatgttattcttggattagcagtattcttccttgcccgtgtgctgggtgcgctttacttcattaataatattgcggacaaagaactgacggataaatgtcgtcgtgtggtgcggaataatacgattctgtttcttgtgttcttcttgacatttgtgattcgtacattggtttctgatggctttgccgtgaatccggatacacaggagatttatatgcaaccctttaaatatttcatgaactttatcgaaatgcccgtagttttgatcttattcctgataggagtggtgttggtactcttcggtattggcaagacgttgcttagaaagacttttgataagggtatctggtttacagggattgggacggtattgactgttttgtctttgctgttggtggcaggatataataatactgcttattatccgtcttatacggacctgcaaagctcattgactttggctaacagttgttctagtgagtttacattaaagacgatggcttatgtttctatacttgtcccgtttgtgatagcttatatattctatgcttggcgtagtatcgaccgtcataagataacggaaaaagagatggacgagggaggacactcttattaagttgagagttgaaagttgagaattgagagttggctgcgcaatagtaatattattgcgcagccaactttttgttttaatgtcggactggatagaaaaacagtttttgattcttacctatttgactacattttccggtgttccggcgatgtatgcttgcagattgctgattgcaatgttcatcaatctttcgcgggcttctagggttgcccatgcaatatgtggagtgatgtagcagttcttggctgtcagcaacgggttatcagcatggggaggttcggtagagagtacgtctactcctgctgcaaaaatcttaccactgttcagagcatctgccaaatcttgttcattgattagcggtccacgcccggtattgattaagatagctgttggcttcatcatggcaagacgacgggcattaaccatctcatgtgtctccggagtaagcggacaatgtaaactgataatatcgcattcgctgaaaagttggtctaaatccatcttcttgatttcaggtggtaattggaaatgagactttgaagtcaacgcatacacttgcataccaaaacctatggcaacacgtgctgttgtatatccggtatttcccaatccgaccagacctattttcttatctctcaattctatcagcggtgtatcccagaaacagaaatctttgctgttcgtccagcggcctttatgcacttcttccgaatgatgttgcacttgctggctgatattcaatatgtgggcaaataccatttgggcaacggaagctgtgctgtatgaaggaatgttagtgacaacaataccccgttctttagctgcaactgtatcaactacattgtatccggtagctaatacaccgatatatttcaattcgggcagtgcagccatgtgttctgcattaatgattactttattagtcaggagtacttctgctccggctgcacgttctaatacttcttcgggagcagtacggtcgtaaatcacgcattctcctaaggcttttatcccttcccaagacaaatcgccgggattggctgcaaaaccatctaaaacaataattttcatttcgattttatattaataatatgttatacgtcttttttgaacttgtctccccacagttgtatcatccgttcggcatgtttctgttctgccggattattctgcggtttccagatacgtttgtctttcaattcgtccggaaggaactgttgtttcacaaaatttccttcataattgtgagcatacttgtactcttgtccatagcctaattgcttcatcagcttcgtaggtgcattgcgcaagtgtaatgggacaggtagattacctgtcgagcgaaccaactccaatgcatcattaatggcattatacgctgaattgcttttagggctggttgccagatatatggtcgtttcagctaaaggaattcttccttcgggccatccgattttcatcaatgtatcgaaacaggcattagcaagaagcaaggcattgggatttgccaagccgatatcttcggaggccgaaataaccagtcggcgggcaatgaaagccggatcttcaccgccttccaccatacgggcaagccaatagattgctccgtccggatcactgccacgaatagacttgatgaaggctgaaataatatcataatgcatttccccgtctttatcgtatgccaacgggttttgttgtaatcgttcagtcaccatttcatcagtgatcacaacggtgtcttcagcttcggattcaacgaccagctctaatatattaaggagtttgcgtgcgtctccaccggaaaagcgcagcatggcagttgtttcttttagttcgattttacgttctttcagtacagtatccgtagtgatggcacgttgcaggagttccagcaaatcttccttctccagcgatttgagtacatagagctggcagcgggacagaagcggacggataacctcgaacgatggattttccgttgttgctccgattagtgtgacggttccgttctctacggctcccaacaaagaatcctgttgtgatttactgaatcgatggatttcatcgatgaataggatagggctggactgggagaagaatcggttgcttttggcacggtctatcacttcacgcacatcctttacccctgaagtcactgcgcttaaagtaaaaaacggggtttccagcttattggcaatgatttgtgccaatgtagttttgcctaccccgggaggtccccagaggataaaggaggagatgcgtcctgcgtcaatcatctttcgcaagatagcacccggtcctactaaatgtttctgaccgatatattcgtctaatgttttggggcgtaatcgctctgctaaaggttgcataattcttagaatgccattaataccatgaagcggacaccgtttttattgatacccggattatcacggtaggtgaaacgatgtacatattcaatgtgcagcaacttgaatatattatagatacccacacttgcttcaacatacggaatcttcggatccatgacaaaactagtaaattttccatcacgcatcgggaagcggaacaaatcggggttactgcttttgaacggattgttcttgtctgtcagagtaccccataaggcacggacacggaacatttccctccatttcagattcttgataaggggaatacgattgaatagtttgccattcatatcgtaagacaatgaaactgaagcgaaacggtcgttcaagaactccatattattaataaggttgaacgtctcgcgttgggtgatgtatgataagttggcttccggcagaatcagtaacgggaaaggaacggtgttccactcggcccctgcctttatactgcaatctatctttccccacgaagatggaagccagaaacgtttccatacactcgcttccgtacggttgaaactgtattcgccacctaacactcctttgaatcccatggcatgagtgagtgtgaagataggagcgtccaatgacacggggatacgacgctgtttggagttgacaaatgattcgcccggagcatagcgtagtgtcaggcttgcttcggcagtagtgacgtcatgcacacgggtttgtgcggcatcgttacgcaaatactccaattttccggcaggctcgtcgttacggtggcggagcattgcttttataccgaatcctgtaagtgtttcaagttcatagttgatggtagcatcgcgcatatacgacatttggtctactgtcgttgtttttaatgaaaggaaaatgttatctttatctgtaaataggaatttatccatcggagacattacatcataactgtaagttgccgaaatgtaatgtttcgggaactcccaaaccacataatcgcgtttgttgaatgaatatgtcagtgttccgctgtatttccatcgttcatctttcagaccgtaggctccataaccgttcaagaaccagtgtttgttgagatgagctgttgtcatgccacttaaccgaaaacgggttccatcaatatagttgctcgaaatcatcgtattgataggacctatgtctactttactcggatgtttcttgcttcctgtttctacgaagttttcgatcacagctttcgcaccgaagatgatatacttaaatcccggaatctgttcgagtctgttgacgaatacatccattgtgctttctgtttttgtcagtggtacttggcgaacactagcccagtattcatcgcttttcgagagcatatcggcttcttttatcacactgcctttcaaacggaaaagccgttgctctatagggtcgaacttataattgctatattttgtagttcgctctacctgcaatccccccaccgttttgtttgaactccacgagagatctacggtcatatcgtcatctgccaatacccaattgccatttggtagttgttcatactgttggacgatatccatacggttcacaaaattgactccggtctttttaggcaggttcattgtacatttctggactgcataggtagaatctttcaatacatagagatgtcctgtaaatccgaaatcctgcgaattctgtggaacaaatgtcagatgtacgcattcgcgcctgtccaccatcaacgtatccatcagataatacttataaaaagaaatggcattgctacctataggactgacgaaacgctgctgaagcagacggatctcgtcatcatagatgttgatatccgcaaagacgtccttcaatacagtgccgagcatatctcctgtagagaagaattcttcgataccattggagttttttcctttgataatcgttttcttactttcgggatctttgcggaagatggtttgtgaagccgtttcttgtacagagatcgggagaatcaatttattggtagtttccgacacttctacctgatctctaaggaaagaatattttttgtagatacccttctctagtttttccggagtaaggtcattgatagacattttcatcttttcgtacttatcgtactgataatattcgttcacttcgagggcttgcgccttcttatgttcgattactttcttcatgaactccactgccggattgttcttgcgcgaatatttttctttcttaggctttacaacgacttcattcagaatcacgttatccggagctaactgtacattgaccgtctgattgccatagttcacttttactgtcttactgatatagcccactgcggaaaaaacaagtgtccccccgtttctacgggcttcgagactgtattctccgtcaatattggtgatcgtacccatatcctttttttcttggtagtaaacagatatatacatcaatggctcatgggtcaccgaatctgtaactactccctttatctgctgcgcaaaaacgtttgaggctgccaatatgagtaagatcagtataagtattttgctatatcgttgtttcataaacgttcttagtagagctacaaagttaacaaataactctgaggatggttgaatatataactttttttacccatcattgttggttatttactcgtaaggatctgtacgatacgctctgctgtgcgcccatcccagcgttcgggaagctcgcctcttttccattcgcctttcattaatgtgtccattgctttggcgagaagaacaggatcttcaccgacaagttcgtttgttcccatacgccatgtttccggatgttcggcgtatgtattgagcgtaatacatggaatgcctaagaatgtcgcttcttcggctacgttgcctgaatccgttatgattccttttgccttgtttatcagataaccgaaaaatagataattctgaggaggcatgatatgcaggttcggtgcttcgattcctaattctttaatggcattgcgtacatacgtgtgcattggagctacgataggcataccggcagacttttcgattaatgtttgcaaaagttgtcggagattctccttatcattgagcagtacacgccgattcagggtaagtaggaggtaattaccttcttgcagtcccaatacggaaaaccatatcggcttgagtaaccggtttctattatatcggatagtatctatgaggatattacctacataatatacgttttcgttttctgttcccgtctggttcagattacggttggcaaccataccggcagtgaacagatagtcggatagcccgtctgtgatcatacggtttacttctttcggcattttcatgtcgaaggaacgggttcccgccaccagatgcgccactttgattccttgttttttagcgacgatggcacaactcatcgttgctgtcagatcatccactacaaggactacatgagcaggattttcggttagttcctgttcaaaagctatcatgattccggctgtcaagctcgtaggattactactttccactcccagatagacatcgggagctttcatgtcgaggtccgaaaagagagaagcgtccaaacttgtatcctctttcttgcctgtatataccaatcggtacgagatacttttacccagcgcccgtgcggcttcaatagcgcgtgtaatgggggctatcttcatgaaattggggcgtgccccggcaacaattgttattttcatactgtttctatcttattcggtttaattcgtgaagcaaaagtacattttcttacggaatttattcgttactttgcatacaaaataacaaatatatgcccacattcgttcaaattcttgattttataggcacatttgcctttgccatcagtggtatccggcttgcgtcggctaagcgtttcgattggtttggagcctatgttgtaggtcttgctactgcgatcggtggtggtactatccgtgatgttctgcttgatgttactcccggttggatgacaaatcctatttatctgatatgtacgggacttgctttgctgtgggttatttgtttcggacgttggctgatccggctcaataataccttctttatttttgatactatcgggctcgctttgttcactgtggtaggtgtgggaaaaagtatcgctttgggatatcctttttgggtagccatcattatgggtagtataacgggagcagccggtggcgtgattcgtgatgtgtttatcaatgagattcccctcatcttccgaaaagaaatttatgcgatggcctgtgtggtaggaggcattgcctattggatttgtgacctagcagggatcgaatcatacggttgtcagctgataggcggattagtagtctttctaacccgcatcttagctgtgaaatatcatatttgtctacctatattaaaagggggagaagaggcggaagactaggctaatcctccatctccagttcgccttggaaactgatagattgacggttctgcatatttacgttgatgcttgcctcaccattcgtatatactttggctctgaattcatatctgtcttccggattccgggcaacgaattcgataacggcatttccttttttatccattttcatatcatattctttaaggggagctttgaaatcgagtccgtcacctccaccatacgggatactgtaggcccgtccgaaataaggcaagtaggagataaccgagtcatttctgatttccaatgagtagggagacgtcaagggaatggagcgtccgcgcatcggcatggcggtcctgacatctatcttgtaattctctgaggcaatgagcttcttgacagcctcttttttctgctctttcttctcttgtttgctttgagcggaaagggggagccccactagcaaggctagcaataacataaagatttgtttcttctttttcatatccgttgtatttaggttgatataagtataacaaccaaatttactaaaaagtcgggaactcctctgttttctttaatgaaaattaaatagaaaattcgaccttcctccgatttgcaccacccaaaaactatcaaaaaacacctagaaactatcatttgatagaatttcccctcataaataacggaaattacccttccgaagaggaaaaatacctttaaacttgcaaacatcgagaaaaacgaatattaaccattaaaacctttaaagtatgaaaagtttaagtttcagaaaagatttaattggagttcaggaggagttgcttcgttttgcttataaattaacggctaaccgtgaagaagcaaatgatttattgcaggaaacgtctttaaaagcattagataatgaggataaatatgttccggacacaaacttcaaaggatggatgtacactattatgcgcaacatctttattaataactaccgaaaaatagtacgtgaccagacctttgtagacactaccgataattattatcatttgaatttgccgcaagattccggatttgacagtacggagggcgcgtatgatttgaaagagatgcatcgtgtagtcaatgcattgccaaaagaatataaggtacctttttccatgcatgtgtcgggattcaagtaccgtgaaatagcagagaagttaggtttgccattgggaacggtgaagagccgtatctttttcacacgtcagcgtttacagcaagagttgaaagattttgtataaatggggatagcacacagtcggacaagtttatcagtgaaaggagcaagagagatttctcattgctccttcttcgttttcttgtttttaccttgttgctttcttatagtcttttcttccggtgggaacttgggaaccagattcattaatcgtaatatctgtttttgacgttttaggatatatggcgaaggcttcgcagaattgaagcgtatcgggttagggagggtagcggcgataagcgcacattgtccccgtgtcagtttggcggctgttgttccaaactttatttgggcggtagcttgtgcaccatagataccatttcccatttcaatggagttgagataaacctccatgattcgttccttcgaccagaataattcgatcaaaaaggtaaaatatacttcaaacccttttcgtacccatgaagacttaggccataggaacacatttttggctgtctgctggctgatggtgcttgctccccgttttcgcttacgtgttttgttctctttcattgctttcctgatctctacgaaatcgaacccgttgtgttccgcaaaacggttatcttcggaagctatcaccgccatcgggaggttaggggatatcttatcaaaagaaacccacgtgtgtttccacgtgggtttatctcctgagaaaatctgctgaacacttcgaataaccatcagcggagtgatataaaccggcataaaccgatagataatgaccgtcagtaaggtcgatgtgaagaaaaaaatcagcaggttgcgtgtataacgcagtaattttttaattagcagctgcctgtgcatctctgatcatctgttcgctagcgtacatatatacttctacacggcggttctgttcgcggccggctgctgtatcgttgcttgcaatgggatcgctttcacccataccttgcacacctttgatctggttgctggacacaccgcaattcaacagatagcttgctacactctgtgcacgttcctgtgacaagttcaggtttttctggcgactttgttcagccgtactgtttctccatccttgattgtcggtatatccatagatagatacgtccatatcacggttctggttaagtacattatttgcgaatttgcttaatgcggatttagcggcaggactcaaacttgcgttacctgttgtgaaaaggatacccgagtcgaatgttacttttacggctttcagtccgttgttatccgtaatctgttctacttgcgcaccttctatttgttttgcttcggctgcagctttatccattttctttccgatgagggcacctgtacctgcgcctactgccgtaccgatggcagcgccgatagccgcacctttacctttaccgataacgcctcccagaatagcacccaaagcagcgcccgaacctccacctatagccgcacctttaccggtgttattcatactcgcacagccactgaatatcatggcaacactcataaagagaaccataaacttcatcttgttcataatgttgatgtttttaattagtaaaaaaataatttcatacgaatcatatcgtatgatgaataacaccgcaaagatatatattatttagcaaaggtgtactttttaagttaaaataacgagtggaattccgaccgtctgttaacgaaggagaatcctgagttattcttttgttacagaagggatactcagacatttctttttaataatcacaaaccagcttaaaagtaccaatcctttggcaacggtagtgacgcagacagcccaccagattccttccactcccatacccatttgcacgaacaaaatagcaagcggaatgcgcatatagttgcagacaatgctgataatggcaggaggtatcgtccggccgataccgtagaatactccttgcatggtgatttcgagcatcatgaagagctgtgaatatccgtcgatgcgaaggaaaacacctccggcttcataagcagcctgttcggggacgaaaatagaaaacacctcatttccgaagaaaacaaataataatgtgcagaatgttccgaagataccagtcatccatagtgtagtatgccaggccttgagtacccgttcgatccgtcctgctgcatagttttgggcgataaaagtacttaatgcggtagagaatccctgtgaggtattccaggtgatagcttcgatttgtcctccggtcgtaaaagtcatcaatccgatgtgccctccttgttcggaagcggtgcggcaaaggaacatattgacaaaggcgaaaagagtatttaatgttgctacgggtaatcctagttttaagattctccgtgtatattgtttcttcagtcgtgtgaaaaaagagaacccgccaagcaatgcatctctataacgcaactgatagacgaaagtaagaaaaacgcttgcttctgcaatccaggtagcgtaggctgcaccgttagtacccagcccaagaccaaatatcagcaaaggatcgagaatgatattcaatatcaatccggtaccactgatgaaaaaaggaatcttgctacgtccggctgcattatagattccggtaaaagctgccgacagaaagacgaaaggtagtccggtagagacaatccgtaaatattggatagcattggcggtaatatgctcttcgagttcgtagatgcgtatgataggatcggcaaaaacaaaaagcaatccaccccagcaaagagaaacgataagtgcgattgtgatgttatgggatgcaaagttccgggcggcctcctggttctgtgcaccgatagattgaccgacgctgacttccgagcctaccttatttaataaagatatggaccccgacatccatgtcagaattccgacagagccgatggcggctacagcttcacttcccagtcgtcctacccatgccatatccgtgaggctatacgccatctgtataaatgacgttgccatgataggcattgccagattgaacaattggcggttgataggcccttgcgtcagattctttattccttgcatatctttttataatcaaaatgaagtgcaaagatatggaaaattactatcttcgcacatctaattattcattaatcaaagtacatagatactatgaaacagaaattttctactctttttttcctgttgcttttcctgttggcaggtcagcagacggtagcccagaaggctcccaacccttttgatattgaacaaccttcacttcgtgtattccttccggcaccggaattagctacggggcgagcagtggtagcctgtcccggcggaggatattcccatctggcagttgaccacgaaggttacgattgggctccttactttaacaagcaaggcattgctcttattgtgctgaaatatcgaatgccgaaaggcgatcgcacgcttcctatttcggatgccgaagcagcaatgaagattgtgcgtgacagtgctgatgtatggaatctgaatccaaatgatattggtattatgggatcttctgccggtggtcatttggcgtcgacgattgccacccatgccaaacccgaacttcgtcctaacttccaaatcctgttttatccggtgattacgatgaatcaatcgtatacccacatgggttctcgcaataacctgttaggaaaagaagcttctgccgagctggagaaagaatattccaatgaaaaacaggtgacaaaagagacaccgcgtgccttcatcgtatatagtgatgatgataatgccgttcctcctgccaatggcgttaactactatctggcattgaataagaataaagttcctgcagttcttcatatttatccttccggcgggcatggatggggaatccgcgaaggtttcctttataaaaatgaaatgctggatgaactgacagcttggttacgtagcttcaaggctccccgtaaagatgcggtccgtgttgcttgcattggcaacagcattacttatggagcccggattaagaatcgtaatcgcgacagctatccttccgtgttgggacgtatgttgggtgacggttattgggttaagaacttcggagtcagtgcccgtaccttattaaataaaggagatcatccgtatatgaaagagaaagcctatcaggatgcgttggctttcaatcccaatatcgtagtaatcaagcttggaacaaacgatagcaaatcattcaattggaagtataaggaggatttcacaaaagatttgcaaacaatggtggatgcattcaaagctctgcctgcccaaccgaagatttatctctgctatccttccaaatcctatcggactggtgacaatatcaatgatgatataatttccaaagaaattattccgatgataaagaaagttgctaagaaaaatcatttgccggttattgatcttcatgcggcaatggatggaatgcccgaacttttcccggataaagttcatccgaatgaagaaggagcgaaggtaatggcaaaagccgtttatcaagctttgaaagaatgaaatagaagaagtggcctttgatatacatccggttgaatttacttcagaagaagatttattcaatcggatgtttttagtctatcgataaataaacttcttataatgtgttaaaaaatatcttttagaaagttatagattgcctgcaatatttaattttgcatctttaactatctttagaaaggtgagttagcatagcattatgaataaacagaaagattttatatttttttcaaaattgatgaatgctgctgacatgggttggtggaaggctgatctgacaactttaaattatgagtgttcggagtatatctcgaaattgttgggtttggatgattcgggtattattagttttgaaaattttaacaaacgcatattgaaggaggagcaacgccctacaactgttcattcttttagtgagcagcagatgtcggaagtagtgtatttacttgatacggtaaaaggggctgtttgggtgcggagtaaggtctgctttcaggaaacggataaagaagggcatacaaatgtctatgggatagccgaattgcaggaggctcctaatatgacatcagcttatcaggccttgcagcacagcgaacgcatcttgcataatatttataagcacctgccggtcggtatcgaattatacaatgaggatgggatattgatagatttgaatgataaagagcaggagatgttccatctcgagaaaaaggaggaccttttaggacttgatatcttcaagaatccaatgttcccggaagaaatgaaagagcggttgagaaggaatgaagatgcagactttacatttcgttatgacttctctaagatcggttcatattataaaaattccaaaagggaaggtacgattgacctggtaactaaggtaacgacactgtatgatgatgagggcaatccgattaattacctgttgatcaatgctgataagacagaaacgaccattgcttataataaaattcaggaatttgaagagttttttgagctggtgggagattatgccaaggtaggatatgcccatcttaatcttctgaccggagaaggttatgcccaaaagagttggtataggaacatcggtgaagcggatggaacgccgttgtccgatatcattggtatctacagacatctccatccggacgaccgtaattgcatggctcaattctttgaagatgtacgaaacgggttgacggctaaattaagtaaggaagtgcgtgtccttagaagcaacggtgaatatacatggacgcatgtcaatttgttagttcggaaatatatcccgcaagataaaattattgaactgatcagtataaattacgatataacggagttgaaaaagacagaggaaatgcttgtcaaggcgcgtgataaagccgaagcgtccgaccgtcttaaatcagcttttctggctaatatgagccatgagattcgtacgccgttgaatgcgattgtcggcttttcagccctattggcagctacggaggatatggctgaaaaagaactctacaactctctcatcagtcataataatgagcttctgttggagctgataaacgatgttcttgatttgtccaagttagaatccggttatctggagctgcatccgagttggtttaacctggcagaacttttagatgaaagtgttgcggaatatactcgtcagctagctgcgggagttgaacttcggacccattatcttgatcagggttttctagtagaattggataggttgcgaatcaagcagatcttaaataattttctttccaatgctctaaagaatacgactagtggatatgtggaggttttttatgagatagattcgtcctatgtgcggatcggtgttcgagataccggtcgtggtattcctcagaatatgttggaaaagatatttgaaagatttgagaaagtcgactctttcactcagggagctgggttaggtttgcctatttgtaaatctattgttgataagatgaacggacggatatgggctgattcccaattgggaataggtactacttttatggttgagttgccttgttctgtcactccaattgatgcataagaaaatgagggtgtgtcaaaacgtgatttgatgaaaggacaacttttaatctgaaacttgactccctaaatcgggatattcagtaaatgttcctctttctaaaaaatcaagagaaaagctcacgtaaagcaaagcttttctcttgattttttcgttcaactctcccagtcttctatcttttttgtagaatattgtttacatattcttgttttttccttcccacccatgcattatgtacatgtcttttttaggggaagttaaaacctctcctgtttttcctgttattttagtcagattatgctgcctttctttttttcttttcgaccttttctatcatacataccgcattggctgtatgtattccaaagaaaatccaaagtacttccgttttcctgtttctagcttttatcctggccagtgagtaatgttgtttctgcgttccaaaacttccttccaggcgggtagctctttcacggctgagttccgaccgtaagattctccgaagcggctcatctttggcagctctgcccttacgcttaaaggaagtacttatatgatatttagtacaaaatttccggttggcattattggcatagattgaatccgccgcaagcgccttaaccctaaccccggtcagttgttgttgcagatgaatacagtctttcaaacgtactccttcgttaaaagccttaaaggagatatgttctataaaggagattccgtctatctgtatattgttgactttggctccgaattcaacggatttggtttccttgcctctgataatggggcgaaggtaatgccggtcgatactcacgatacggttggacacttttttgcctgcaaataaattcttcccttgctcaaggactgtctgtatgaccgagaaacgtctttggtaatcagaggatagtgcaagcctgttcctgtaggatgaatgaagttgctccagctggtcaagtaacttttccaataattgaagtaaccttcgtgtaatcatacgagtctgtgatttcctgcgtttacgcagtttgctataagcaagataggcacggcgtacatcaagatacttgttacggggacgttgtatgtgcaatgtacggcaatgtttgcacagatgacgatgaagccatacaataccttcccataagagtttggcatcagtaggaaaacgcagatgactttcataacaggtggcatcggtcatacagacatgaaggttctcaagataaggtttccaatgctcggcaagaatgagctggagggactcaacgtcaaggcgatccgctagttcctgacgaattgcactaacgattttaggattggttagtggatgaagcggatcaatctgaacaccacaaaacaactggtaatgaatattaccgtttaaatgctcaatcagttgtgcatcggaaaagttggtataggacttcaagaccatcaaggctattttaccttcgggagaaaaataacttttacgacccaaagcagaggacttcaaatgcatttgtcgggccagttccgagaaaggaaacagagcatggaggcgacctaattcactcgttgcaaaactttgacgatatttttttagcatatcgaactcggtaaaacctaaacgaggttcgatttctgagattttttgtatctttaccatgtgtttttattttagattacccccgttttggccgtcaaaccgttttttggggggaatgcttaaagatacaaaaaaggcaactaactcgcaatgaagtagttgccttaaattttattattttaggaatatccctaaatcaatgatgaaaagagccatatcattactcaaaaacagagtttgatatggctcttttataattgttagttacaatctgtaactttttagagtagtcattttagttttgatacaccctcattttgcttttcatgatccgcctggggctttgttgatatatgaaacactttgaatgtcagatggataaggtttgttgctttatgttttggtatctttttggtgtctaaaaaccaattaaattattatccttaaatttagccttttcctcaaaatcgttttgagcttgtattatggcattttttagtcttttattgaattttcctatccaattattttcagcataatcaatatcatagggggagctatttataatccatcttagcttaataactttatgtttgatgaataggttagcgtctggtatattataaaaggtttgggtgaaatatcttttaggcatgtagactgagcctgcataatatccttttctttcataattccaaggagaaatatctgtatttaattttaaagtgacaatgctgtcattatctagttttatatagcaatcttcattttcgtgaatttcgtagtatccatcagaagcaggtttatatatagttaacatgaaatgataatcttcggtacatatgactctcattgctgtgtgccaataacttccggtaaatcccggctcgctatgaaattctttgcttattccccatttataatctttttgttcttttacgtcaacaaccttctgcccaaaacagtaaacataactaagcatgatgacgaaaaaaaaagtatattttttcataattattttttgtgttttttgcttattgtattcttttaaattaaaaaacttttgaagttggacttccattgtaaacgattaatataaaacatttctcgtttggtgctcttgaactacttagctttcttgttttgatatagctattaatttcatattactctctacttctagattattaagtagattatctttttattcgatcaatttataaatccctcagccatttttttccagatttcgtgcgaaaccaaataagtatccccacgcatatcacagaacaaacggtaaacagtattgatagcatattcatataatacctcctattttaatattttgtttccaatgttagctaaaagtgtcgtaagtattataccaatagatagtgaataccaattaacgacctctgcaaaatttataaatgatggtgctattgttccaagaacaagcgccgtgaaagtcagtttggacaaatctagaaaatactttgctatattctctcttctagtcttgtctttttccttgatctctttctttatttcttgtttgtcactccaatttcccatgcgaatatagatgtttattgtatattcttaaattaaaatgccctcttattgttttataacctgtgcaaacgataagttttaatccttcttcatttgatgattttagatcgtgcaacttgttatatctatataatttcatattactttctacccctagattgttaagtagattctctttttttattcgcccaactatctttaagtcggcaaaagcttgcgttaaagtgtcatctatgttcatcggtattaaattagtctgaaatgaacaaagagaagcgcttttttgtttaggcggatttggctatttctaactgccctttcaaatttcttatttcttcatatagctttttgttctctaaagccatctctttaagctcagaagcagtctgaccaaataggtttactattctttcatacttatccatgcttacatattgactttcgtctatattgttatttttattttcacttacagttttatacatctcaccttctccacgaagaagccattcggcagaaatgtctccaaatgagcttagtattccaatgatggtgtctaagcttaatgctctttctcctttgaattgttggtttattgttttctgatttgctccaatcattttagcaaactgtgtctctgagttggatttgttctcaaaaacttcacgggcccttttcaatataagctctttcattatgattgttatttatatgtattctaaatagttcaaatattctaaacttttttgaataaaatattgttttaagttcaaaagctcttatatttgcatccgtattccaataacgcaggatacaaacggatataaaaagggctgtcacgacgtaaaccgtgattttgttgaacccaaaatgtctcagcggcaaatatagtgactcccttttaaatatccaacaaaaaagacgataatgtctgatgggtttcgtggctgttacctcaaatgaagaaaatattaattcgggctctattcgagtaactatcaacagccacatcagatagtgaaaggatagggctttttttaatcagatgaatctgatagaacggagaagttatgaatgaaacagaatcaattttaagcctattgagagcgttgtgtggcgaagtggctgaactgcgtatggcagtcgaagaaaaaactgctaaaaagaagaatttcacttataacgaaacctgtggatatcttcggataagccgtacaactctaaatgagaggatgaagcgcggtgaatttccatgggctgtaaagcgtggcaaaagttggctcttccctttcgaaaaattgaaaaaatatgcgggcaatcagatttagtatctaatcgcatatatctttataaaacccaaatcaccgctcctgtgaagtgcccggtcttttaattgtgaataagtttaaaatttgatgggtcgtttttctcgtatataagcgaccgctgggtgtacggttcgtgagaatagtccactttaaatagagttttcaaaccaattatataacttttaaaaatcaaaattatggcaatgcacacattttttgaagttcgcgtccgttacgaaaaaacgatggagaacggaacggataaacaagtgaccgagccttatttggtcgatgcgcttagctttacagaagcggaagcacgcattattgaagagatgaaaccgttcatttcgggtgatttcaaggtaaaagccgtaaagcaggctaactatagtgaattattttccaacaacgatgctaactcggatagatggtataaagctagattggcctttgtcacgttggatgaaaagagcagagccgagaagaaaacctataccaatattcttatccaggctgcggacttgcgtgtcgcagtcaagagactcgatgaaggtatgaaaggaacaatggctgactataagattgtctctattgctgagacaaagataatggatgtgtatatgtacgtaccggaaaaagaacaataatgaggtttctacaattcatattatccatactccttgtggcctgctctttcattatgttggcaggagcgatagtgaatgctagtcctataaagatgttgtctgtaatcgggatgctaataatatttatcctgtgttgtgtgatgtctggaatagcttgccgggagctgttaagcaaaagtaaataacaaattatatgaaactgaaagattataaaatcccttccgaatgttcccgtgtgtcaataaaggcggaaggtcgtatgttggtcataatgttcgagcctgatactccgaacagttttttctgcgacgaaacggaatccgtagaggaagaaccgcaggtgggacatttggctattatgtgggataaccaatgcagcgcggctattatatcaaaagtctctgatattgactattcagatttcacatataaagcgaaaaatggtgtatggtaccggaaagctgtccgcttccgaaatgaggaacagtacaataagatacttcaatcaaatgttgcaaaaaagactgagatcaagaagtaacagcttgaaaaataagctggacgatgtttttagtgaatttatccggctgcgtgattctagggatgacggaacctttgtatgtatctcatgtggaagattgttgccttatgatcaggcggattgtgggcactacattaacaggaagcacatgtctacccgtttcagtgaaaagaactgcaacgcccaatgccgttcctgcaaccgctttgatgaggggaacattcaaggttaccgtcgtggacttatcgccaaatatggcgaacctgtggttttaatgctcgaagcatcaaagaatcagataaacaaactgtctgaattcgaatataaggcaatgattgaccattaccgtaaggaagtcaaacgtttgaaaaaagagaaaggaataaagtaataatggaaacgtataaaaaggtaaaatgtgactgtcgcgactgtaagcgtgcgggccccgtagaaaacttcatggtgttttgtcctattcataggtgtaaacggtctgtaggattaagaatgtgtatgtattttcagaaaaaagatgttcgacaaggtaataataaaggctacggttgacactgttgatattgatacgattgtcttacggaactacctggaacaatgtacggaaggtgatgaaatctattacaaatcgactgcctatgccaacttcgatggatgcttcattgaattacgcggtaataagttgcgctgtaaatgctccatctgtaagttgtatagtaagggaaagaatggaaagctcgacaatagccgacctatgacctttgctatggctgttcgaacgatcaaagaattgctgttaaggctttgtattagaatggagaatgcagtagttacttactatgagataggcataacgatgaaaatgtctcatcctgctgactattatatcaggcatgttcgtgaagcttccgggcgcatattatggaatgatgcgaactttccggaagctaaacagaagacaacggaaaaaagcaaatatttccgtaaagttttgaagatatatgacaagacatttgaagccggagagaaggggcgtcatgttggcgataatgtattgcgaatagaaacggtgtacaggcatcagtctgtatctctgttagagttgaccagcaacctctttctgtcaaagataggccgtatattttataaggattggtcggaattgtgctttgtccgggagttatcggcgaagaagggagtcaaactttcgcagcttgataaggctagagaaattcatcggataggagtgacgcgttacaaggaacgttataggggaatgtatcttgatggtaaactgactaagaaacagtgggagactatcagagtatttgcaaacaactggtcaaaggaacgcgaaaactatatcgaagaaataggtgatatggagcaggaattcaaatcccgtcttttatctaattatcagattgggatatttacacctatttgtaagaaagtgtaatatattgattatcagtattttatgtaaaacggaaaaagcaccatatggtgcgcatataaagagttgataattaaatagttactgttattaatttgtaaatttaacaattttcggcaacttgtcctatactgcccgcagggtagttgggtaacaactcaaaagggcagtttgctttaaaaaagaacaaatatgccgtataaagcttcgggcgtaattattgcggtaatgcctaccgcgcatggaataacaagaaaagggaaagattgggaaaagcaggaatgtgtgttagaaatgtcggataaatatcacacaaagatgaagttttccgtttattcttgggatggtcctatcgaaactcctcttaaagtaggagacagcgttgaaatatcttttatggtagaagcaagagaagtaaaaggagattggtttaatgaggtgaaagcttataatatcgaatataagtgatgttagcgttaaaataagaggtaattatgactgtgacagaattgataaaacaattggaaaattgtatccggaagcagaagtctatatctatacaggtgatataaatctgatggttattgatgaagtggaacaaaaagctccggcaatggtagtaatttcatgacttaagataaaataaaaccttgcggtgtatagggaactgcattgataaaatgaatacaaataatagttctaaaaatggtggtgttggcttctgtggacttcttacgatagtatttatagtcctaaaactgacgcattatattgattggtcctggtggtgggtcttatctccactctcgattcccgttgctatattcttaattgtagtttttgcaattattctatcaaaggtaatatctagaagaatatcaaaacctgagcaagaaataaagaaagtaggatttgcaggaaggattcaaaaacttcaggatgatcgggaaagaatgaggatgaataagtaacataagaaagaaatgagtgaattatatatacccatagaacgccctacaaggaatttggtaaatggcaggttcctgaaaggtcacacccctcataacaaggggaagaagttgaaattccattcaagatggagtaaacgtagatgcttaaagaatttggaaaaaggacgtggagcatggcacaagacgggtgctggcatgaatcggaaaagtgtagtagctataaaaaatggtcaactgtgtggtatcttcccttctattcaagatgcaggcaaggcaacaggggtcagcccgtccttgattagttatatctgccataagaaacccggcaaacacaaagcttgtggttttgagtggttctttgagaatgataatacctggtgtgatttgatattaaatggaaatggatgataaacgaaaacaaatattggtagattacatatcatacctgtatacaacaggaaagaactatgattccattggcaagtatatcaagtatgtaacggattttcttgagagcgccgaagaaatcaatcgccgcggttatttgaaatataaacataaaaatgcggatgctatggtgcgccattcgtttatgtgtgcggctgtttgtgatttattgtcttatcttaaaatcggatatggccgacgggaaaaggctgtaaaacctttggagaaacttgaggttatttcagagaaaaataagaaactgctccatgatttcataatatggttgactgataacaatgattattcatcacatacagttgatatctatcacacctctcttaagcaatacttcgaatacgccaatgaactgaatatggagaattgcaggcgatttataaaaagccttgaagaggcgaagctctctcctgccaccattcgattacgtattacagccattgagaagttctctaaatggatgaaaaagccgatagaattgaagaggcctaaaatgaaacgtaagttagatatttctaatgttcctaccgaagatgaatataatcggttactggagtatcttaaaacaaaactcaacaaggattactatttcttcattaaggtattgggtactacaggggcccggctctcggagtttcagcaattcacgtgggaggatatagcgaccggtgaagttgttctgaaagggaaagggaacaagtatcgacgtttctttttccagaagcaattgcagagggaggtgaaggactatataaaggagacaggcaaatccggtactcttgctgtcgggagattcggaccgttgactcaaagaggtttttctcagcacctgaaagcatggggtaaacattgcggtatcgattcaaaaaaaatgcacgctcacgccttccggcacttctttgctaaaatgttcctgaagaaaaccaaagatgtaattcaattagcagaccttctcggtcatggtagtgtagatacgacaagaatttatttacagaaaagttatgatgaacaacaaagagactttaataaaaacgttacgtggtagtgtagctcagctcaatgaattgtcgaatatgactgaaggtatagatgtttatgacgctgccggatatgttgatactgaatttctcatggaagcactatcttgcgtcaatgccttcatggatgcgagcaatatggttgtagaaaaaatatcttcactgttagcgccggatgctccggccgacgaaaagaaaaagcaggctgatgaaggtaagaaatggaatgtggaagaaatattgaagcattgtactcttgaggatagtgttcttaaacttccgaaagtacaattcaataagaaatcctatgctgaagcaaagaaatggatagaagaagctggcggctcatggcagggagataagatacagggatttacattcccttttaatccggaacgtgtgttctccatcttgaaagaaggtaagcgatgcgatttacaaaaagattttcaattctttgaaacgcctgctgatgttgccgactggctggttatgcttgccggagggatatatgaggatgatacagtattagagccgagtgccggacgtggcgctctgataaaagcgattcataggtcgtgcccgtcagtaacagttgaatgctatgaactgatgccggaaaacagagagtttcttcatgcacttgataacgtaatattgcttgatgaagattttacgaaagatagtgtaggacattacactaaaattattgctaatcctccgttttccggtaatcaggatattgaccatgtaaggcttatgtatgaacgcttggaagaaggtggaactcttgctgctattaccagccagcattggaaattcgcatctgaaaagaaatgtgttgagttccggaaatggttggaagaggttcatggagaagtttttgaaatcggagcaggtgaattcaaggaaagtggaacgactgttagcactatggcagttgtaataaaaaagtgattcaaatcgatataataaggaacattatggaaataatcaaactaacgaagaaagaagaggaatggattaaggagctgaagaagttaatccgaaagaaacctaagaatctgattctctttgctgatggaaatttaaatatcttgaaacttgataaggatgataatgatggagtggacgaaaatggaagaatgaaaagtgatagaatagtagaaattattcttaacgcctgtgatggaggtgtattttaattagagtaaaacaacaatagaaatgattgaatttacagaaagagaaatccgtattatctctgctgctttagatggaggtaaggaaaatgtatttagtcctattgttttacgtcagacaaaagtaaataatgcatttggtatcggttttatagaaggtgcattatgggctgatgaacatccaaaatccccatggataagtgtagaagaaagattaccggaaacaaatgatggacaatctttatatgaggttattgtagctacttccgatagaagattcttagttgtaatcaatacagaagtagagtctcttgttgggcttttaggagtcactcactggatatatattccggagtttaatgaaaaataattattaaccctttaaaatgatacgaccaaagcattacaattatcacaaccggtccctactgtccaagtacgtaaggactacattaaccgcttccggcaatcgaagcccattgaaggaatatacttcacagacttcatccgggaagtacttgaaaagagatccagacgcaagtctgaacactatgcggccgtctatgatgctatcataaaacacattgataacttctcagaagaatatgattgcgatatattcaccaattctgtaacggctgaattcttagatgatttcattgtctatttggaagaccaaggtctacgacataacaccatcgtcggatatattctgaaagtgcaaacacttgtccgtagagcatcgcaatacaattatgcagtagataatacctacgatgagattgatttgaaatgcgagccgacaaatgcggtctttctctcaatgaatgaaatcactaggatatactactacaagtttgagaagcaggataaacggaaagccaaggaacgaattagggatatgtttgttataggatgtcttaccgctcttcgctactccgattattcaaggttgacaagtaagaacctggtaaacggttatatcatggttcggacaaagaaaactaacgttgatgttaaggttccggctcatgattatgtgaaagagatattcgagaagtacaacggttgtgttcctaatggtctatgcatccaatacttcaacaagtatctgaaagtgataatgaaggaaattggactgaatgataaggtcgcctactcttacacccagggcggtgaactaagaactgtcacccgtgagaaatgggaactaatcagcagccatacagctagaaggagtgcggctaccaacatgtatctgaccggacggatgaaaacgttcgagataatgaaactgactgggcatcgtagcgaacagaacttcttccggtacatccggttaactggtgatgatacggcacggtctatttcaggagatatgttttttagaaagtaaaatttagaaggattatgaaagataaaagacagttgaaatttgtaagtattcaatctaaggtttccccagaaacagcagaaaggatagacaggatagttaaggaaagtggttttgaaagtagatacgaactgatgcaatatctactatctgcatttttaagatatgcagataaagagatagaaggcagtgatgagataagcgagtttgctaagatattcgaaggatatcaaaacaagaagaatcggataatcactactaagcctggtggtaataggggaatgaaactagttgaaagtattaatatattcagtgagataggtagaaagggatatgtgtgcaagcgtattgtgttgaatggagataaggagagtattacatctaatactgaaagtgtaatacgctcagtaataagaaagctatttccaaacattgtcggacatatagagagtatcggcaatgatataggtgagtgtaactacatgaagatactggaatatatcatgatggaaaagaaggactcggacgatatcaagagaagcgtagaggatgagttcaagataatgaagcaggaagttgattatggtaatacccccctgcgtctaaaacataaaacagtaaatgagctatgagcaagaatgcggattataacaggatgatacaatcaccgaaatggaaggtattgaggaagaaaaagataaatgcttttccaatatgtgaagattgtaatgaaaggggagtagtagaaccggcaacggaagttcatcatattgtaccggttgaggcggcttcaagcgttgacggcatggaatatctgatgtttgatgtgaataatcttcgctctttgtgtcatgagtgccataagaacgcccatatacggttagcatcaaagaaaaaagagaatatacagaagaataacaagcgtgctacggaaagatttcaaaaacgttatctttagttgaaaggtaatatttaaagacagaggggggtgttttttcttccgccccagtcttactcaaatccactgcccctaaggagagacattttttgtttttgggaaaatgcccgtgggggtaaaaaggtatgattccacgaatagggtttcaattagcaaaagtaggtatgcttaaaatatttaacttatggaagagaataaagaatataataaaaaagtgaaggagcttaaaagatggattaggactttgcttgagaaaaacgaactgtattcaccggagcttacttatcaggtagaggttgcggcttccatattggttgtatttcgggatgtggcgaagaaaacatacggcaaggatgtcacgattacggaaaagagccgcgagggacatccgagggagataaagaatccggcttatgatacttattgcatgatggctaaggctgcgcagaattcattgaagtcgttaatgatgaacagggaaatacgccctgaaaaaaagatagagagtggagaagacaatgatattcttactaatctgatgaatgatttgaaggaggaatgatgtgcaggatgtgtctactagggaatataagaatgaaaggacgcgggaacttttatctgttgacatagagagataccaactggatacgatagatccccgtctcttgtcttacgtggaagaggttagggaaaagccggacagccataatctatatgagatactggctgtcttgaagtttttccggttgatggatacgtatgtcttccgtccgtctaaggtgaaaaaattcgtcaagctttatgagagccttaaattttccgggatggacggaaggcgctgttataagttgacgcgaatacagtattttcagttcgcgtccattttgggattttaccggtgggaagtagtgggagatgctaaggggatgccggatgcagaggaactcactaaaaaagtggaagggggtaaaaggtatgaattgagaaggcttgtccgtgaagctatcctctttgtgcctagaaagttctccaagacaacaagtaccgcttcattggcggtaaacgagtttctgtttggtgatgcaaatgcacaggcgtatacagccgcgaacagttacaaacaagcaaagatatgttttgaggaaatcaaaaagataatcaaacagttagaccctcgaaagaaatacttcaaagcaacacgcgaaaccttgcactggcggcctaataagtttgaacgcgaatcatttgtagaatgtcttaccggtggaggtgatacaaaggatggcttgaatgcatctctggttatatttgacgaatacgcgcaggcgaaatacgtgcgtgatcactcggacggtgcggagcttttgcaggtactgacatcttcgatgggaacgcggcgggaacctcttacgattatcatcacaactgcaagtcgtgtagaagatggtccgttttcgcgcgaattggagaatgctaaaagagtgttgaccggagaatataccgatgattgtcagtttgcatcgctgtttcagcctgatgcgtgggagatgaccgaagaggagatgggaaaaccggaggtgtggagaaaatgtaaccctcatatcgggataaccgtacaggaagggtattataagcagcgctgggataaggctcagcgtgatgttgaggctatgatagagtttaagaccaagcttctaaacatctttgtgtccggtggaataaaggattggatacctcagaatcttgcaaggtcgttaatgactggttttgatatagagaatatacaggggagaccggaggcaatggtggctatggacttatctgtcagcgatgacttctcggcagttgtatataacatctatagtcgtgcacagcggaagttttacctgtggatggattgttatatcccggaagagacgctgaagagtcatccgaataaggagttgtataagatatgggtcagtacgggattcatgaggatatgcccgggggctgttattagcgagtctatgatagtggaagatgttttgaagaggaataagaagctgacaattcttcagataggatatgacccgtataaatctcaagaggtcgtaaacgcattgggggctgcgattatggcttcgggtacgaagccggaaaagatactccgtgctgttcctcagacgtatggtgcatttacttctcctgtggaaacattcgagatggcagcaaagagtatgccgccaaaggttgctctttccatgaatcctattcttccgtattgtttcgggaattgctacttagatgaagacaggatgtgtaataaaaaaccgttgaagagaaaggaaaatttaaagatagacggtgcgatcgcttctttgatgacattctggctttataacaattatgagcaataggtagtctcaaacaggtattagaccgtattatgtaacggtttaatatgatgagcaacaaatttataaatctattcaagagagaggtgattgccgggaacaaaagcgaaaagaaaagctcgacgggtggtgattacaaacagaatgtggtatgggtgacaagtgctgaggcttcaatgaagatagcggcagtttaccgtgccgtgaatctgatatcttcttctgtcgcttcgcttacattgcagtataagagaaaagaccgggtaaagaactactttaagatgtacgaggataaggatggaaagcttttgaactatcttctaagtgtccggcctaatgagcgcatgaattcatttactatgatgaaaaatgcggtggcaatgattcttttgaggggaaatgcctatatctatccggcaagaagcaggtataacggtgtggagaagatgcatttgtgttctcccggttctgtgatgtatgacatgtatagtaatacatacaccattaacgatcctgtcaactgtatatacaaaacggtaggtgcagacgacatgatccatctgaagaatgtaagtcgggatggtggatatactggggtttctacgataacttatgccgctatgacattgagtatcgcttcgactgctgataatgagactttgaaacgatttgctaccggcgggcgttttaaggcgattcttcaaaatgatacttccgtcaaggggtttggtgaataccaggataggcagatggaaggaatgggtgacgatattcaggaggcgttaaatcgtggtgatgatattctgcgattgaaaggggatggaaaattaaaccctatcagtatgagttcggcggacatgcagtttttggaaaacaagaagtttacgcttcgcgaaatagccagattttttaacgtcccgccgtccaagttgatggatgatagtaatgccaattataaaagcgtagaggttagcaatattgctttttatacagaagcattgcaaccgatagtaacagaaatagagcgggaattttcatccaagttattaactgttgatacctatcaggattataaatttaaatatgatttgggtagcttgtatgctttggatttggatagtaaggccaagtgggacaaagcgcggttggataacgggcaggcaagtgttaacgatctacgtagggaaagcgacaaaatcccggtggataagggggatgatgtctatctgagtgttaatcttgcgcctcttggaagtgctaagttgagtggggaagtggctgaaccggcgaaaggcttcaacgagctatcggataataagaaggaggaagaaaatgagtgaattaagggttgtgacattgagtgagcttaaggcgcagatgcgtgtggacttcgaagatgaggacgaaattattagattatatggaagtgctgcggaggatgccgtgatagagggtacgaaccgcacattggaagaattgaaacgtataggctatgccgagaaaaacggtggagcggaagatggagagctgtttccggacagattaaaattggccattctgatattggcggctcacaactaccgtaaccgggagccggtcgcttctgtttcgcagaacacagtgccttattctttggaagtgtattgcaagccgtacagaaaactaacggatagggaggtttgatatgctgagggcgggaagtttgaatgaacggataggcatattggttcctacagttaaccggggagagtttggtgagcaggaggttatatttattaaaaagaaaacggtatgggcgggtgtgacttttcaaagaggtgcgaaggctttgacagccggtgaagtatggatgtccggcagtataagcgttatgatgcggaataaccctttggtgaatgaccgatgtcgtttggaatggaatggtaagatctacgcaattgaaagttttaacagaagtaaggttgacggaagcatctcaattgtatgcaatgtgatagatgaaggaagtagcgttgagagcgagtaacctgaaaacggtaaaagaaagtaatatagaagctgtaaagttagtgtgttctatagaagtgtatttatagcagtgtgttctatagaaggtctgttttatagagaaagcgtaataacaaacatggaagaaagaaaaagagagataagaagtgcaatgggcggtcactttcagccgcatttgcgtgaagtttccgacggggaaggtggcaatcgtataattgagggatatgcaatcgtattcggtgtagagagtcggatgctggttgattattgggacgattatcgggaaataatagagccgggggcaataactgagcaggagttggcacagatggatattaagatgacgatgtggcacaaccgggaaaaactattggcaagaagtaacaagggggttggaactcttaaattgtctgttgatagtattggtgtgaaatacgaatttgaggctcctaatacttctgacggtaacaatgccttggaactggtgaaacgtggcgacatgagtggtagctcttttacttattggagtgatgaggcttccgctgtgaattatgctaaggatgaaaacgatattctgattcgccatgtaaaaaagataggcatggtttatgagatgacgatagccagtgaccctgcatatacgcaaaccagcgtaacagcacgggaaattgagcaaaccggcttgaaaataggtggcaactccaatgatgaggctcgcaaacgtgaggaatttcgtagaagagagcgggctatcagagaagtaagagaaaaaagtaagaaacattttttttaattgagaaacatatgaataaggacaagaaggttagtgtacagcagtacatcgcaagaagagagcagattgtaatccgtatgaatgagattgctgatgctgctgagggtgaaaacaagagagaattcacagaacaggagaaagaagagttgaaggttcttgaacgtgaaatgaacgtgcttgatgtgcgtattgcgtccgctgaaaagacgggatatgtcacggtaacgagccgggaagccgcttttgatgcttttttgcgggagaacataaaaaagatgacgaacgtcccgttgcagcgtgaatataccggaataatgacaaccggagctgaaccgctgataccgttaacgatcaatgatattcttcttccgttggaagaggggttgattctgaaaaaggttggtcttccgttgatgacaggcttggccggtgattatgtatggccgactgttggctctattgaagcggaagtagctggggaggctgtggagttgaccgataaaaaggtagattttggaaaaatcaaaccggaaccggtgcgcgtgggtgtaacagtcaagatcacaaatcagaccatcactcagacagagggtgttgcttatgaagtggtaagacagcagcttccgcaggctatggctcgtacgcttaaccgtatgatgtttactacggataagagcatcaatcataagcttgtcggtccgtttatggaaatagcgaagggaagtcctgtggatattggtacgctgactacgaaggcaaaaagaaaagccgctaactacattgcatttgccggtgctattcccacttacaaggaattggttttgatgcgttctttggctcttttgaaaggcattgaaggtttgaatccctgctacgtgatggatgaatataccaagggtgaattagaatctacggaacgtactgtagggagtggaagaatgattatagagaacggtgctattgccggtattccggttttcactaccaactatatcaacaccgaagaagatacattcatcggatttgggtactggggatacgaaccattgcaaggattcggacagcagcgattcattattgatccgtacaccggtgccacaagtgactccgtgcgtctgacattgaatgctgactggtctatgactacattgcgtaaagaggcttttgttcttggaaagtgtgcatctgagtaatacttccgtttctattttgttttgtttatcatctttgcgggcggactctgtttccgcccgtttttactaaatcaaaaagggtatggcaaatttaatcacacgtcttataatggacgcttctcagtatgatggcggattgcagaaagcacagaaaggtctggataaattcattgataaaaacacttcattaagcacggtgatgacgaatgccaagggagttatagctaaaatggcaggagcaatcggacttgccgcgggagccggtgaagtatttaatagagtcttaaactcatcccaagttctgggtgatgcaactgccgccacaatggaaagtgctaagaatagcatagatgaattcttttattctttgggttccggtgatttcaccgcttttcttaatgggttggatggtataatagcaaaatcaaaagacgtatatagcgctttggaccaattgggtaatacaaaaatatcatttgatttctatcaaggtgaatttgatgcggctatagcaaaagcaagactgaatgccaaaaacaaggagcttgatgagtcagaaagaaaaaaggcttttcaagcgtgggatgatgaattaaaaaagaaagaggaagctgggagaacagttgcggaggaggcattaaatgcgcttgtaaaatctattgctgttggaacagagctaagagcttcagatataaactttgaagatttcagaaaggtgatgaaaattgatttaatgccatctgcatcacgtgacgctgctaaaagttattgggcacaacaatatgaggaatataaaaaattgaatgatcggattgaaagcgaccgaagagtagacgttgtgagaacaaatgatttaggaagagtaaaagacattaataaagatgctaaaatagcgcaagaaggcgcagctgctcaatataaagatgcaataatatacaataagcttttgaataaactacacgatgatgatttaacaaaattggcagagttaggtaagttatactattctgtatcccaaacgatttcacagcaaagacaggagcttaacgaatcaacaacagagtttaataactcaataaatacaactgcaaaagcgcaagagagtgcagctaatgctgctgccaaggctatcagggaagcaagagagaagaatataaacccattttacaacaacgaacaactcaacgaagaaataaaaacggtaatctccggcagtgacgcattaagcgatgaagtcttaaaggctataagcaccggtaaaactcttcctgtattaacccagccgatacaggctttaatgataaagagtgaagatgaaaaggtggaaggagaagatccgacagaagcactaagaggaaaggttcagatgtatgagatagcccaaagcaagatacaggaatacactaagatgttatctgttgcgaatgaagatgaaaaagcttatttaaatgaacagattgctatttggcaaaaatatacagaggggataaccggaataggcgaacaaaaagatggtacagataaattggcttctaatcttgctcaggtaagtgctgccttaatgaagatgggggggctttctgacagtgtttttggttctatgttgacttatatcagcggaatagccggtgcggttgctgaagctattcctgcgatagcagcattaactgcggcgcaaactgcacaagctaatgcgaatactaaaaatgcagcttccggtgccgcttcttctgttgctagtattcctattgttggtcctatcatggcggttgctgccgttgcttctgtattggctgcaataatgagtgttccgagttttgctgaaggtggtattgtaggtggtcataactatatggacggcataaccgcccgtgtgagtagtggggaaatgtttatcaacgaagccgaccagaagaaactgtatgattccatccattccggcaatataggtaacggtggcggtggaagaacagtagtgacgggtgagcagatagtcactgttatcaataattacggcaagagaaccggaaaaggtgtaattctgaaaggataaggagtatggcaaaggtagaagctggctatatagtcaagactcccgtaatagttacggatgccaggggagcgttaggattactgaaacgtttaagctacacggagataatccgaaagaaagacttgaaaaggtatatccgccaaagtcttaatcaggcgaaaaaggaagtacagaacgcagcaaaacgggcgttgcctaatgacccgcgaaaatcttatttgggtgttaaggttggcgtttataaaaaaacattgggtggtaacatatcgctttttaatcaacgttcaactggaaagaaaagcaactactctttgccgaaaggtgggagaagtgggatagtgcgcaaccggaagagaagcgccaggactacgcaggtagattcctactacggacgggataggtcttttatcttgcgaatgcataatcaagggacaacaagtcgtatagctttcacccggacgaaaagcaagagtggaaaaaccgctaatcgcggttcgttgcgcgcattgaactttttctctgtttctgatgctgcggtaagaagatcagcggacaccttgtcgcagaaactggaacaggctatagtagaagccggatatggaaagtaacctaaaaacgtataacataggtaatataaaaggctatgagtttattagttggatttcatataaagagtgccttgctcaaagatgaggctttggtgaaggaggtcggaagcagaatttatcctcttgttattcccgagggagcgcctgaatacccgttcattgtatatggaagtgcgggaatatctccgacggacacaaaggatggaagctgtgaggataatgtaaatgcgtcggtagtggttgtttcaaaaacatactcctctgctattagaattgctaatatggcccggtatgctttggaaggtgtgtcggaaaagtataaggattttgaagtgagagattgcatgttgtatggaagctccgaggattatttgcaggaaattgacgctatcagtgtgacgttgaatttcaatataaagacgatagactattgatataatgtttaactaaataagtattgatatgggaaaagcaaaaagcttgaatggaaaagatttgatgctatggatagaagacaaggtcgtagcattgtcgacgagttgtaaaattagccttgctgctaatacggtggacagcgctaccaaggacgacggcttttgggatgctgccgaaataggcaacatgaactggagtgccacgaatgaatcggtggacagcgcggacaaggatcgtaataatgactacgtatatgaccagctgtttgatctgtttgttgcgggtaaaccgttgacgattacggtaggattcccgacaaatgcaaacaatgatggtgtacccgaagaaggatggactgctccggcgaaggggatgtatcaaggaaaagcccatataactgcgcttgaccgggatgcaacaaaaggtagtaacgcaagtgtatccgtatctcttaccggatatggagcgcttagaaaaatagcagctgaaggatgaaggtaacaatcaaaggcaaggagtatgaattctcatttgacagcatttggggacctatgtacacctatgaagtgatggctgggaaaaaacttccttttaatccggaaagtactttatgtcttcatatattgtactactgtattttatgtcgggctaacgaaggtttcactctttcttttgaggacttcattttatcgttgaatgacatcaccctggtaaacgccatgagtgattattatgtgaaacgtatggaggtgctttccgaaacggtagagagtgctgaacctgaaaaaaaaaagaggaagtctcggaagacgttaaaagtctgaacgctcgtgaagtgtatcaattgatagtcggtgagggcggttgttctcccgactatttttttaaccgcatgagtatacatgaagcacgtgattatatcataggactaaacaggcgttatcgtcaggactgggagcgtacgaggatggaagtccaagtgttacacaaggttcagaccggtaaagacttggatctagaatttccatgggagaaagaagagaaaccggaagcgacagaggaagaaattgaaagactacgtgaaaaagctaaaatgatgcaggatctaataaacaaaggatatggcaagaaaaatacgatggcagataaagttcaagacactcaaaaataaagatggaaggattgatatctacgaggagggatgggatggcggagtcacagagttggaaccggcagcgaatcccatcaccactgaagaggattctgatgacgattatttgaaacccatccggtcgcagactggttatctgcgtgttgtagataatggcgacctggaaggcttgatgccatcggataatagccagcattatgtagaattgcatattgacaatgaattggaatggcgtggatatatgcaggccgacacattttcagaagactgggatgttacccccttggtaatagaatatcctcttatttctccgataggcttgttggacggggtgtatttggaccaggagaaaggaatgggtgttgtgatgcttgctgaattattcttggaatgtatagaagctaccggggttgcttatgataatgtatattatccaagggaagtgtggtatgatgaaaatgagggtggtctgaaagctccgtttgaaataagcctgtcccgtcagacatttttcaaggataacggttcggatgaaaaggattcggaagattggaagagatacgatgccgacacgtgcctttcgtttttggaagagttttgtaagttttggggatggacgttgcatgaacgcaagaaagatttatattttatcggacaggcggacgaatgttataaaaccactatggaaaatataagaaagatagtctatggtggtacgtatattgctaacaggcaagttgtgaaagagattgacttctctcttctttcattggatggtagcgacaacaagaaggaaatattacagggtgtaaacaagttgaaggttgttgctaaaatagatgcggttgggacggtagttccttcaattgatgaggggtttatgaatgtgatatatgatgggacaataacatataaaaccaatgatacaattaccggttataaaaaagtaatagcctatgaatctgaaaacaccgatgtacaaatgaaagtatatagggggagatttacagatgatggcgattgggtatgggaagacagtccatatatttttaataatatgatgattggtgttggagctatgtatgttaaaagagatatatactcagcaggtgatttgcaaaacaaaagaaactataattacaaaaatggaatatggataattgctcggtctgagcagataatttcacgtcccggattggaacaggcaagagggatgcctatccttgtaatgagatcagcgaatgcggcaaagtatagtaatggggcatttgtgatatcgggacaaacaacggggtatgaaactgcacttatgttaaatcctaataatccgacagatggtgcaggagcgatagaaatcaaatttagagtgggggataaatggtggaatggaagtggttggtcgaacaatgaggtttggtttgaaattcaagccggtagcgaaaatggatattctataccgggaaagatattgagtacaaaaactttggatatgccttacaatggggcagatggatatgtaatgcctataaatgaagatttgtcgggaatcgtggagttaacaatgcatgctatagtcaatacggcgatgtacaagcagctctatattgataatttgaaagttgattattataaggatgataggttgaatcctgttggtaagtcaaataaaaatgaaaatgtatatgtgtctcttttaaaaaggcgtgcatcaggagagaaggaacttgagcttaaaatagcaagtaataacaataaccaggctgcgtacaacacattatatggtgcaggaagagatatcggaccgttgtattttgtgcaggaaggtgctagcatgttagctgagcaacatcttttgggtatactaaaacaggtctacggtagagttatagagaagcttaatataacggttgaacgaagtgatttaactccgatgatgaggctcgtaagagacgaaaaagtataccgcatactttcagaaaagatagaatgggccgacgaatcggaggagataatgattgaaaatataccaggttaatatggctaagataaaaggaaacgatctgatattgttcatacagaaagatggtaagtataaggcttatgcttattcgaccacctgtgagatagacattcaggctgatactatagaagttggaagtcctgataccggtcaatgggtaagaaaaaagaagagaaaaataagttggcgggtaagttcggggtatctgatgagtgatggtagcgcttcaatggaaattttcaagacgcttatagataaatcccccattatgataacgttgggaagtgtaaggtctcacacggacgttgttaatgctgatgaatatgagaatgacggaagattgacaatgcaaggggaagggttacttacccgtatgacggtaactggaagaaagggggatttcgtaaccatgtctatggagatagaggggtgcggaaaattagaaatgatatgggaaccgaaaataaccatagaacctgaatcggcaagcgatgaaggtatagcaggggaaagtaagatattgataacgggaaatattgactacgacatatcatctgattctcggtggttgacagtgagtaaaagagaagggaaaatgggtgttacggaagtggcgatccattatgaggcgaacgatggagaagtacgggtagggaagatttctgcaatcggtaaatatccgtatgaatctacaactgccgagtttgtgtttacgcagcgtgtccatccgtctaaattcttgataatagaaccgacttctttggatattaacggacatggagatgagaaagttataaaaatatcgggatatagagcctgggttttgatatacaaacctgaatggataacggttacgcctgataatggaggaagtatttcgggggaatatgaggagacagatgttgttgtcaaggctgatatcaactacgaaggagatagggatgggcggattgagtttataacttacgatgcatatttgggtaagacggttgatgtagcgcaggagaggtatgaatatgtatcggttgatccgaaggaagtacgttttttgaaatctggtggagaagagaaagtagagttggtcgggtcttcgtcttggtatatagaagacaaacctgaatggatcacggttgctccgagcagtggagacggttcttctgtgatgctgaatatagtatcgggtcctaatgatgagaatgaacggaggggtagtatagtattcagaacggatacgggtgcaagttcggaaataggtatagttcaaatgggtgtaggggttgatattgttgtgactccggaaactctggaattcccggaagatggtggaataaaatatgcgatactgaaagctggtcacgcatggagcgtatcttcggatgtgtcgtttgcggaaagcatatctccaagaaacggagatgtcggaatgtataagatagctgttacaatcccggcaaatatgggagaacggcgtaccggggaatataagataacggatgcgaacacagggtatgttgcagggttaaatatcatccaggaagagaaaaatgtcattctgtctgtttccccgaaggatatagtgatcccgcaagacggttctcctacttctataactgtaaattcaaacacttcatggacagcaatatgacggacatagtaataaaatggaaagagggagaaggtaatattgttatttctccgggcgagaataatatcgctaatgtaacaagtgatatcgccaatgaggggcttgacaggtcgcaaacggttgtttttttttcaataaaagaaagtgatacggcatcggtggaaactaaagtgtcacaagaaggtaagagagaggcattcgcggttacggagggaagatttatattgtctgacggtaatacatttaacgtaataaaaaataaatatttatgagtgattataatagtaacttttcaggggatcaggttgttgaattactaaacactatcccaagactggctaaagcggatttatccaatgccatgactgtttccctgaaccagaacggttatgctaagtttaataacggtctgctgatacaatggggatattttagcaccggtgcttcaaataatcagtctgtcaatttcccaatatctttcaaatcctgtttttccctagctttttccagttctacggataatacggataattctatatggtctgtgaattatgcagctatatatgcttcatattttacggtttatagaagatacgcaaacgcgggaagtgtatccccttcttcgcagtcattcagatggatagcaataggaagttggaaataattaataaagaataattatggaacaaaaaatgtattggaaaaacggattccacgacacaccccaagaaggtgcaatagagattacgaaaaagtattggcaagaattgttagacggtcaatctgcaggaaagcttattgttaccaatgatgaagggtatcctatactggtcgagcatgaacatacgattgacgaactgaaagagatgaagatagcggaaatcaacgcctatgacaagtcggatgccgtcaactcattcacgcttgccggaaaacagatatggttagacaaagacacccgtgtcgggctggtcaactcaatcggtatcgagaaagaatccggacggatgaataccacgctttggtacaatgccgagaagtacgttatcccggtagatgatgcgctggctatgctcaaccagcttgaattgtacgcccttgactgctacaatgtgacgcaatcccatatagcggctgtgaaaggtttgtctgatgccggacaagtggaagcctacaattacaaaaccggatacccggaacagctcaattttgtattataaactcaaaaacagataaagctatgattctattagtattgttttcatttatcctcatcgcaggctatgtttatgcgatgattaagaaagggaaagaaatcccttattcaatcagtgccacctattatgcgctgacacacaaattctggttcgctctgtgcatgattggctccggtgttctgcttcttccggcagctttggaatcaagtacggagaacagccagtttcttgtattcctttcggttgtcggtatggttgtgctcggtgtgtctcccaacttcaaatcggagcaaaaggttcctcatgcaataggtgccgccatgtccttaatcttctcccagatatgggtaggctgtaacagttggtattggcttctattatggttgggattcattatttacatggttgtctccatgaagaagcattggacgggtaacttcatctccgatttcataaagagaaagccgatgttctggattgaggtaatttcattgttgaccgtttatcttacttgtctatggtaaagggtcagttaactcgtacaatcagctcatccgtatttttcggtgagttgtacgctctgatgtgggatatgagatggctcatgctctttatcttaatccttataatcgtggatatgtggtacggagtaagcaagtccatcaagcgtggcgaagagtttagaaagagcagatgtgtgaagagattcctgttgaaatgcggagattatatctgcctgctgatacttggtgccgttcttggcaaggctatcggtgagcctttgggagtttccgcattggttgtttctgtgatagttgtccttatcggttgtttggcggaacttgaaagtattaaatccaactattgtgagacaaagggaatccataaggatatcaatgtgttcaaactgctgcttgtattggtcggcttcaagagcagggagttggagaaagcgattgaggaatctataacggataagaagaaggatgagctggataaatgaaagtaaccgtatcaagcacctgctctacgccatcccggcaggtgcactgttaaccatcctgtttgcggcaggactggctgtcggcatggagttcaaggaccgtgcatacggtggaaaatgggattggctcgatattgccgctacgctgataggtggttttatcggtcaggtgattcaaattggagtattaacattgatattataggagggaataaatatgagtttaccaagaggactaagaaacaataatccgggcaacatccgcatcacaaaggacaaatggcagggattgagagaaaagcaggaagataagtcgttcttccagtttacggaaatgagatggggctaccgtgcccttatccgcactttgcagaactaccgtaagagacacggctgtcagacggtggcagattttatccatcggtgggcaccggagaacgagaataatacagccggatatatcagccgtgtatgcagtgaaatgcaagtcccgaacacatacgtcccggacatcaacgacaaagcgaccatgtgtgctttcgctgccgctatctcacatgtagagaacggtatcccggctgtcatggctgacatagaagccggatgggaattgttataaattaaaataggaggaacaatcatggcagatttaagatttacaaagaataatgatactcaggaatatgtggcggaagtagtggtaaatgcagattttaatattcacttggaacgtgtgtccaatggtggtcttaaaatctatcagaagaatggtgaatatgcggaagctgttgacggtcggactgccactgagagaggctttgatatggtagcggttcccaacatcatcccgtataatccggggattatctttgactacgacttctcggctttagtttatccgaaaactatccgcatcgagagtggaagtgaagtattaagtggaacagtaaccgaatccggcaatgaagcttaacaagttaccattaaatgtaatagggttgaatcgggttggtttgaatcagatcggttcaccttcccaccgggctaatacttccgcccgtccttacatagacccggaagtattagcttctttggtcgctgtctgtatctgtgacggcaagagcaacgacgaccctgacagggctgtaatcaagaacttggttgccccggacaatccgttcatcataagtaacgcagctttcaagcttaatagcgggtatgggaagtatgaggaagattttactgattggataatatatccaaatataaaagttactgatagtgtaattactaccgatggaaattttaaatctaattggtttatatataagcactctagtgaaagtaagataaatgaaatgaatataaaagtttcaggtattccaaaaggaggaaaaatcttatacttttatatttcagatgaaacagctaatttgcctattgcatatactataccaaaagatggtatttatcatttacctgaatctaagattaataagaatcgtgctagtgtaggatttacagtagaaagtcgttacgattggaataatataagaatagagcaaatcccctctttcgaaggtgccttcgtcactgacggtaaagacgacttaatcacttccaccaagacggttaaggaaatgttaggaggaagcaatgaggttaccgtggtgagtatggttcatcagataggattgtcttcactgacaactattaataatattcgttcggaaagtgtagctcacgtagtttgtaggaatatttgtagttttgctggaaaaacaggtatatacgggtattcaagacagataaatactaacaatcctcctgcgctgataaataatatacttggagataagaaagactatacagcagaaggtaactcagcattagatcctactgataaattctttgttcaaggttataaatacagtggcaccataagtgaagtgtccccaatagcctactattggacattcatcgccaacaaggtgctgaccacagaccaaatcaatcaggtaatatcctacttcaatttggacaagcatgttaaaccggatgtatactatgacataaagaaacaaggtctaagcaatgatactcctgaagcggattggtatctgaaagactttagtggaaatggtcatgatatgcagttgtataactttgctaagaaactaggtagtggaattggtaaatatgaagtagattttaatacttggatacctcaatcttacgttgctgattctacatatacttctaataagcttcatattactaatataaaaggcagtaacgctattttatatactaagaaaggaacgaatgctatgaaagtaaaaattactgggattcaatcatttaatttagtatatagatatattgccgaaaatgatgtttgggaagcacttgaagttgatagagatggaatttatgaattacctgcgagtactacaaccacaaaaacctattatacaggattcactgttccatattatactggtgattgtgatataactattgagcaaatccctgactacgaaggagcattggtatctgatggaattgatgattacggtaaagtagaaaaccttccaatatacaaggattacacggtagtagctgatagagagatagtggacggattaattgataatgcaggtggtggagtagctattagaagttataactatgcaaaaggggcttttggatttgattggaaaaaccaagcgtttagtttcggtggaaataccgacagaataattgatgtacaaagatttattagctaccaatctaaatatataaataatgggattcaacttattactggcaacgtagtagacaacaatccattatatatggctagattaggagaagaaaatagatacagcaaactagctctttggtcctttttactcttcccttacaccctttccgagttcctgctagagcgtcagttaaagaggtataagttgggtacgctgtatcctggaatgatagagtggagacccaaagtaaatattaatgttccagttgttactcctcctacttttagtatgaataatggtagtgatataaaaattactaatgggcagtatataccagaaggaacagaaataaccatccgagtttttaccacaactgatagttcagtaggaggtctaaatgaagcaactgcaaaaataaatggtgtagatatagagttatctccaagcgggaataagacctattatggaggtaaattcatagtatcttcaaagcaaaagatagacataaccattgacgagtacatcagatacgaagatattgtacagccttatccagcaataattaatctaaaacaagatggtaaaactatcacttggggagataagttgaaagtaggcagtgatatagtctttgtaggaagtgccaaccttttaccggagctatatactgtatccgagacacggtataatggtgtaacgctttacccaaacactatcataaaggtagagaagtctatggtgtttgataatgcacgtacctacctaaaagccaatgagccgaactgtatcctgtcgcctaataggttgaggattccaaattctagctacaagatactaggctacattccggacttgacaggtaaaggtaatcatggtaagcttaataactttgcttatacagaagatagtggtgtgtttgttgatggtagtattaagtttgacagtacagacgaccatattactatacctaatataataggtggtaaatgtgttatggcaaaagttaagattaatatagttagcggagttatttatgaccaaagaagagcgaacgttcttaataaatcatgggtgcaattaaatcctaaccaaattgcatttgaacaaaatgcagtatctacatatatagatggaatattaaatcacaatgttacatgctcagatttggtttctaaaactgttaatcttacttgtgaactagaaataggtgatactagtggaacacatcagccaactataggtagttcgtatgccgttggatatactactaatattaacctctacgagtttatgctcttccccgatgtgcctaatgaagaagaaataaaggagctgaatgatattataggtattgagaataacattgaagtaagttaaacaattaattaaaaaacatatgatatacgcagtagtaacaatcgaatggctagcccagcacggtctgttggctatccccacaatgagaaagagtaaagacggaagtaaggtaatcctccacgaagagtatttgtccccttacaaggacgaagagtttccgagatactattttgacagcccggaactgaacgccctcctgtcgggtgatgaatggtcatggacggaagaggaacaaccagaagggagtgcggaattcatccaggtggcagcagctcaaaacctgttgaacataactaaggctggaattcaaacaatgaacttgactgataacgaagcgttgaaagtgaagtccatgtatccgtattggaacgagtttatcagcaaatcactaacaaccggaatgaaagtgcagtacaacgataaactctaccgggtaaggcagaatattgctgtcgtcttggagaatcaaccgccaagcatcaacaccgcagctctctatgaggaaaacaacgagaccgctgccggaacaaaggatgatccgatcccatacaataacaatatggcattggaagagggcaaatactattcgcaggacggagttatctataagtgcacccgttctactgggcaagcggtgtacgctaacctctctgatttgattggtatttacgttgaggtagcatgaaacgtctgttatacatcctgaccattttcctgatgtcaggaatatgcttcacaagctgccggaacatcaagtatgttccggtagagaccgtgaagacggagtacaagacacgtgatagcatccgttttgacagcatctatgagcatgacagtatattcctgttcgtaaagggagatactgtctacaaagagaaatatcggtataaataccggtatctgacaattaacaagacagatacggttatgctgaccgattctgtgcagatcccttatccggtggagaaacagctaacccggtggcaacagatgaaaatagagctgggcggttgggctgttggcgtaattataatactatctattgtattaatgcttaagatgtttagaaattaaccggcactatcttcacagaccgtttccggtatgaaaagtttaagttttactcacataacaatttccaatggaaaaaggttcataaagaaaggaggataaaatgatacattaattaatactaagcaataagtttatccggtaaagtagaaggccggtaatcgttaacaaataccccaggggcggggaaagaagaaagccccaacccgtttcgacgaccaaatcatacacgggctaacatctcagggactgttaatggggcttcatagctttatcaacagattttgagatgttttgttttaaccctgtatatgtttaacagcatgaaaaatatagatttatacaaagaagtggtcgttgcggtgaaaaatgagacaggagttgaagaatacgaaatgcttcatagtaactccgaggaagcggtagacgcaagatatatccttatacatttgctttcgcagaaactgaccgacacccagatatcttctcttacccgactgacccgtcaatcagtcaacaagatacgcaacaattttcagtacaagataaagaaatggagtgtagcaacgaacttgcaacatattagcaacgaggtagcaacggaataatttaggagcaacgcacttcttctgtcctttgtgatgcggttaatattgaccgtattccaaaatttcgaatcatggaagaagtaaaacaaattatcaaggagaaggaatacgttcacgacaacaaggagaacgaatacgcttctaaaggtgtggccgggactggcttaggtttaggcatcgccggtacagccttaggtctgtgggcgcttgctcgcaatcgtggcggttttatcggtggtggtatgcccgaaaacgtgaatatcaacactgtttcggatgcaatctccggtcgttccggtgcggtagctcctaccgcctttatggcatgggaaaaaagttgtgaagaagcccttgcattgactaacaccatttggggactgaaagtgaacacgcaagaacagatgtacgcacaccgtgaagtggatgttgctgagaagtttggtttatacaagtctcaggtagatgcagacttcggtttgtacaaatcacaggttgagggagatttcggtctgtataagagtcagcgtgatctttacgatgtgctaaatgaacgctacagtgctaagtttaacgacttggacaagaaggttgccgttctcgaagctacccgtccttatcaagacagacttatccagtgtgagattgatcgtgccttcacggcttccattaattacacggataaaaagacttgtcgtgcaatctacggtgtggtgggtttgccgtcaaccccgacagtaaacgtactggagggggcgaatccgtggggatgcaattgcagaagccaagcaagcgcaccagccgcacaataaggaagaaaagttagtggttgtgccccttcgggggtgctccactttcttgttattaaccactaactaacaatattatgacttttggtgatccattattgcaacaaagaaactatagccttcctgaactggaaaaggaacaggaagcattacaacagaagatggctgacatgaagcgtatctatcagcagccacaacagcctgtcactccggtatgggacgaaatagacagaataaccgcttctctctctgataaggagtttgacttccttcaaaacaaccaggaattccaggaaagcagcatggacattcaacaaatactccagcgtgaatatatgcgcataatgcgcccgattgttgagcaaactaaagatggaaaagatgcacttgacaaacatcttactcttttgaagagaatccaaaagaccgcaaaagaggaagcaaacaagaaggaggctctgatgaatgagtatatcatgcattataaccatctcacgtggaaagagtttatagatatgaaaaacggggtagaacctactcccaaacaatctaaaaaatagtaagtatggagactagcaaactattggatggcgtagagaagataaagggcgatctgtcaaattccctcatggtatgggttgacggacgtatcgatgactttgtaaagggtaaaccggtattgtccgttgtcggctcccatcttaagagaaggcttgaaaacgaaatgattttcaattcggataagatgagtaaatatctgaatgaagcaaccatgtgggttatggataaggacggaacggttaaagctgaccttctcgtggatgatttgatctctatcctcaaatccatggaggacaccccgttcaattatggtttcctgaaagggactatcggagaaggaggtataaacataacgctcccaaaaagcccgataacctcttttatattcggcgaaacggaagctatcaagataaacgagaatgaccttctcgaactaaaaggactattaaaaaataaagtatggaatacaaagatttaatcaaaaatgcaaaggccaacggtgtcgcttcggaaaaagcgatgtggcaaagtattgataacctcaatgatgttctctgcgtgataaaggaagaacaccccgaactatacatggcttttatgaggaagcagcatgaatccctgtatggtcctcattatgataggcattttgccgatgcggacgtggaaaagattcgctataccaatgcatccggcgaaaagaaatccggtgctcattggaatatggatcagattctcgatgcaacgaaatccatgccgttcccgcaaggcacaactccctgggacaaatatgtcgctttcaactcattctacgcagacatgtgtgcagtcctcgatgaagcaacgttgttaaaagccgctttccggttctatttcgcagatgaggatgccccggtcggcaaggtttgggagtatatgaccgcaatgaactatgaggactaacctcgacatattactaggccaagcggacgacaggtatcatcacgatttctgccgtctgcttatagtaatgatgtggaacgcttagagagaatccttgattggctgattcctgtcgctgtgatagcgaaggttgcatctttatgtttgtccctggctaaagttgtttagggataaggttgctttgtaatagtgaatatcattttgatagtaaaagtaattgtttactgtgacaaatagtaagtctaaaatacttcaattagactatcaaagtgttacataactaccgataaaacaaaataaaatgataaaatagatagcgagaaattaaaatttctttttattgaagataaaaggcagtctatccgactgcctttcttgttttttatataacctcttttatcttttgaaatccttctaaaacggttttaggcataatctttgcatatatctgtgtagtctttatattgcgatggcccaacatcttggcaacaacctctatgggaagacctgagcctaaagcgatggtagtagcaaatgtatgtcgcccaatgtgtgtactgatatgcttcttaactcctgctgatgaggctaccagttttaatgttctgttgtatacatcatatgcaagatgcggtaattggtagtcgtatctgtctagcacttctataacgggcggaagaagggctgcgaaaaaagtcacacccgtttttaaccgttcgtcttttagtataaaatcctctccgtgacgttctgcttttgtaaagtcgacattcataaggtctgaatatgaaagcccggtgtaacattgaactatgaataaatctcgcgctttcctttctaaagaagaaagtgtcttgtaattcctaataaggtctatctcttgcaagctgagcacggtgcgttcgcgtggggttccgaggctgtcgtggaatttccggtaaggattatcctgcatcttttcgaatttaatagcttcattgatatacaatttgataaccttatggtaggtgtgtatggttgtttgcatcatgaggtgtccgtctaccttacgttttttaagatattcatctaatagtgtaatattgggatatgtcaagtctgaaaagaaggttaagtgcgggtattcattctttagaaaattaagcaccttatagtgctgcttttgcgtgcttacacatgtaggacgctcgcttattcgtttttccatgaattcaacgaatgaaccgccaatataaacgtcattgatgtgatcaagataatcaagggagaatttttgcttgttttggtccaatcggtcaacaagctcgttgatttcgttgatttgttctgtgactttcttgtttaagcgatccgcatcatcaatattcactatacgtccagtcttgaattggtttttgtatagcttgattcctgtggtgacaaactttcgtttgttctcaaatctaacctcaatttgcactaagcctcttttcttggatgaggctgttttttttctgtcgaaaacgactctaatttgtactctgttcataacgcagtttggttttaaaaattggtatccgatttagcaaaaacggtatccgattttggtatccaaaatgcgcatatatcttaataaacccttataaaacagtacatttaaataatatgcatttgcaagtatattgaaatgtaaataattaaagcacaagtagttacgcttattgaatcgtcccaaactcgtgctttatttggtgatccgcctggggctcgaacccaggaccccaacattaaaagtgttgtgctctacctgctgagctagcgaatcaatccttgtttgctttctttcgaatgcgggtgcaaaggtagaacatttttttataactccaaaagatttcaaacatttttcttatctttgtgccattatcaacaatatacattattaatatatggctgctgacgataaaaaaattatcttctcgatggttggagtaagcaaagctttccagcccaataagaatgtgttgaaggacatctacctgtcattcttctatggagctaagatcggtataatcggtctgaacggctccggtaaatctaccttgttgaagattattgcaggtttggagaaatcctatcagggagaagttgtattctcgccgggatattctgtgggttatctggcgcaggaaccctatttggacaacacaaaaacggtaaaagaagtagtaatggaaggcgttcaacccattgtggacgcacttacggaatacgaagaaatcaaccagaaattcgctctgcctgaatactatgaggatcaggataagatggatgctcttttcacccgtcaaggagagttgcaggatatcattgatgcgacagacgcatggaatctggatagcaaactggagcgtgcgatggacgcccttcgctgtccgcccgaagatcagccggtggcaaatctctctggaggggagcgccgtcgtgttgccctctgccgcttgttgttgcaaaagcctgatattctgttgcttgacgagcctaccaaccacttggacgcagagtctatcgactggttggaacaacatctccaacagtatgagggaacagttattgcagtgacgcacgaccgttatttcctcgaccatgttgccggatggattctcgaactggatcgtggtgaaggcattccttggaaaggtaactactcttcctggttggaacaaaagaccaaacgtatggaaatggaggagaagacagccagcaaacggcgtaagaccttggagcgtgagttggaatgggtgcgtatggctcctaaagcccgtcaggcaaagggtaaggcacgtcttaactcttacgacaaactcttgaatgaggatgtgaaagagaaggaagaaaaacttgaaatcttcattcctaacggtcctcgtttgggcaacaaagtcattgaagccaagcacgtggctaaggcatacggagacaaactattgtttgacgatttgaactttatgctgccccctaacggtattgtcggtgtgattggccctaacggtgcaggaaaaacaacgctgttccgcctgatcatggggctggaatcggtagacaaaggcgaatttgaagtaggagagactgtaaaggtggcgtacgtcgaccagcaacataaggatattgatccgaataagagtgtctatcaggttatttcgggtggcaatgaattgcttcgtatgggtggacgtgatgtgaatgcgcgtgcatatctttcacgtttcaatttctccggagccgatcaggaaaaactttgcggagtgttgtccggtggtgaaaggaaccgtctgcacttggcgatggcactgaaggaagaagggaacgtgctgttgctcgacgaacctaccaatgacatcgatgtgaatacattgcgggcattagaagagggattggaagatttcgccggttgtgcggttgttatttcccacgaccgctggttcctcgaccgtatctgtacgcacatccttgctttcgagggcgattccaatgtattctactttgagggttcttattccgaatacgaggaaaataaattgaaacgtttaggcaatgaagaacccaagcgtgttcgttacagaaagttaatgactgactagagaaagtaatagactgaaataattctaatactttcagtttcaaaataaaaggctctacaagcattgtagagcctttattgttttataacgcaataaaatgtttatctctcttaaaattttgtggtataatcgtaatgtagttctaaataatattaattatatttgccgcagttttaagatcaaacaattagtattaactaatcaattacattatgcaaaagagaatgcgatcttttttagtagtagcgatgctgatgcttatgcttattgctacagtaaatgcacaagttacgacctccagtatagcgggtaaggtaacagcgcagaaagaacctatcataggtgcgacggtagtggccatacatgaggcctctggaacccgttatggagcaataacaaatgtagacgggcgatttacgatgcaaggtatgcgtgccggcggtccttataaagttgaagtttcctacgtgggatatagcactgcggttttcaataagattaatcttcaattaggagaaacctaccagttggatattcagttaaaagaatcctcagaattattggatgaggttgttgttacaggtcagaaaggtgtggcagccagtcgtactggagctgcaaccagcttttctttaaagaatatagaatcagtgccgacaatgagccgtagtctgaatgacatcacccgtctgactccgcaggctactgtaaattccaatggtgcgatttcttttgctggtgccaacaaccgctataatagcttccaaattgatggagcaatgaataatgacgtcttcggccttacttccaatggaacgaacggaggacaagctagcgttgaaccggtttcattagagacgattgaacagattcagataaatatcgcaccttttgacgttcgccagtcaggttttaccggtggtggaattaatgcaattactaagtctggtacaaataagtttcacggttccgcatatttctttggaaatacacaagctttgatcggaactactgccggagagatagaagaaggacagaaacgtacaaaattagataaacagcatgattatcaatggggtgtaacgattggtggtcctattattaaagacaaactattcttctttgccaattacgaaaaaacggataaatcttatccgacagcatataatgttggtgatggttccgatttcacacttgaggagacgcagcgcgtattgaatattttgaaggataaaacaggtggtaaatataatgctgattttgatccgaaagatatctatacacgttcagataaagtaggaacaaaaatagactggaatataaatgatcgtaataaatttacggctcgttatagttttgtaggagcacaacgttataatttctctcgttcatactcaaaactgaatgcttccgatgtagcgtttgtttttaccaataagacacattcactgactgccgaattaaattcccgtattggtgataatatgaataatgaagctcgtttttcatatgtacgtgtacgtgataaccgtgagcctcaaggggatatattcccggcaatcaccgtaaagaaaggggcatcttcaatgctattgggtacggaatactcttcttgtgcaaatcgtttggatcaggacatttttacattatcagataacttctctgtattgttaggtaatcactcattgatattcggtactcataatgagatgtatcaatttgagaatttgtttattcagaatctctatggtgcttatacttttaacagcattgatgacttagaaaatggagtcgttaataactattactacggtcgttcaaaggttgatgtaacgggtagggacgattgggctcctagtttcggagctatgcagttaggattttatgctcaagacacttggaatgctaccaaccggtttacattgacgtatggtattcgtatggacatccccatttttttggatactcctacaaaaaacgatactttcaacaatacggatatagctaaaaattatggtgtttatactaatcgtaaactgagtagtactcccttgtggtctccgcgtttgggattccgttggaaattgactgatgatggaagagccttgttgcgtggtggactcggtgttttcacaggtcgtataccttttgtatggttaagcaatagtttctcaaatacaggtatggaatttgagaagtactctttatatagtaacgatataaagaaattgggtgatgctttctatttcaatactgatcccaaaggacaggctgaaatgttacaaaatgcaacggcatctacaacagaggtggatgtcttttctaaagactttaaattcgcccagaaccttcgtgctaatttggctttcgaatatatgcttccgggcgatgtaaagatgacattggaaggtctttattcaaagacgttgaatgatatatattatcgcaatttgaattatgagatggatggtgatgctactgtcggttctacttatccgtcgctttcttttgataaccgacctatgtttaaaaagcaaaatgccggatacactgacataatgttgttggacaatacaagtaaaggctatacctataatgtgtctcttaaactggaaaaatcatttaacttcggtctggatgtaatggcagcttacacttatggagaaagtaagtctatcaactctgcgacttcttccgtagcctattcaaactggagatataatgagacaacaggtaattcgaatgctccggagctgagtgtatccgattatagtatcccgcatcgcattgtggcatctctatcttatggcaaggaatatgccaaacgttttaaatcaacggtcagtctggtatatacaggtcagtcgggtgctccatataatgtgacttattacggtgatttgaatggtgacggtagtaatggtaatgatttggtttttattcctacagatgagcagattgatgcgatgcagtttaaggctacagcgaaactggatgcagatcagcaaaaagcagacttgaaagcattcttgggcagtgcgaagtatctcaaagaccatcgtggtgagtattatgaaagaaactcagaccgtatgtcttttgagcatcattttgatttccgtttcttgcaagattttaaattcagagtagctaaagaaacacatactttgcaattctctgttgatataatgaatgttggtaacttgcttaatagaaaatggggacttgaaagttatatgtccaataattcatattctcctatcacatactcaaaaggaggtgaatttcaatatactcaaggagataaatacgatccgtttaaagagatttcaaacataagctctcgatggagatgccaacttggtttaagatatatattctaagacgaagtatatcataaggaaaagccggatagacaaataagtctgttcggctttcttttttttatagcttcatcctcatcactaccggattatgatcgctataactccagtccggtgaaaagtaatccgtacttttcagttccggagagtggaggacatagtcgattcttagtaaatgcttgaaaaatttgaaagtatacatatagccatgtccgcttgtctggaagccatcttgcagtttgttacctttcttgttaccttttttgttacctttcttatcacctttcttgtcaccttttatggtgtgatagacataagaagacggtagagagttgaagtcgccgcaaacgagggtaggatggggggagtcggctatcagttgtttgaggacatcagcttgcccggcacgtttccggaagttctcgtgcagaccgtctatcagagtcagagcggcacgttccgctttttgggtatcctccttgtaaagctctttttccagttttcttttgttacgggtcacttccgttgtttgcagatgattattaaacaggcggatcgtgcgaccgggtatttcgatgtcacaccacaggctgcaattcttagagtcaggataggtgataagactctgttccctgataggataacggctgaaaacagccagttgcaaaagctcctttccttcgggagcggaaggaacatactgatacggccagttagaaaaagcggcacatacactgtcaatgttaaatgaggaattgataccgacctcctgcaagcagaggatatccgcttgcagattctgcatttgagtagcaatacctttgcaggaataccccatgtgttcgtggttgaaagcatccacattgtaagtcgctacggtcaatattccgggtgtataggttcccagcttggctatcggctccgaagccgggctgaaaagaggaaactgaaggacgcaacttatatacccccaattaccgaataaagcaatgagagaaaggaaaacccaacaccgccagcggatcgtccaataaatggcaaaagccagattagccaataaaagtacaggcaaccctagaccgataaaagggataagtttgaaactctccggtgcagtgtttccggcaaaagcacccactagggtaacacctgccaaaacacctgtcagcaggatagaaaaatagtagaacagtctataaaaggctttcataataatcttaataatcttactttatcctcacacaatattctgatgtcaaccatttacagtcattccgtcgtcaaccacttattgattacctctttcagtttcgactgagctatcggtttcgctatgaagtcattgcaacccgcttccatcgcggctttcacatcatgctcataggcaaaagcactctgagcgataatagggaccgtagcagacagttcgcgaatgatcttggtagcctccagtccatccagattcggcattttgatatccatcagaatcagatccggcttcacctcatcgtacaagagaaccgcttccataccatcgttagcacggacgagacgatactgcttgcctagaatagcgttcagtaaatcatagttactgtccgtatcttcggcaatcaggatacagacctgtttcgtcatatgtatcttttcctttcccgttccttcattcgcggatatgccgtttccactctgcggcacctcctctttgtagagcactgtcttcatctccgaatcgacctctttgggcgtttcctgtgtgctgtacggcaaagtaaacgtaaacgttgtgcccacgcccactattgaactgacggaaatctgtccgccgagccgttccacgatagacttgcagatagacaatcccagtcccgtcccttgagcatgattattcaatttggcaaaacgctcgaacacacgtcccaccttttccggttcgattcccgtgcccgtatccgttacatgaaatacgatctgaccatccaccaactcataaccgtacttgatactaccttccttcgtaaactttaccgcattcccgatcaggttcgaaatcacctggaacacacggttcttgtccgtctctatccgcaggctttcgtccgaaggctcatagacaagttgcacaccctccggtgtgcggaatatatgcgcatcatgtatctcctgacacaaattatgcagactcgtaagtccaaatgaaaactcaatcgttcccgactcaatcttcgaaagatcgagaatctcgttaatcagttgcaacagacgctcgttgttggcttccacaatctgataatacgttttccgttcttccgcgtcatcactctcagttatcagatgcgaaaaaccgacaatcgcgttcagtggtgtgcggatctcatgactcatattggcgaggaaagccgatttcagattgtcggacatctccgctttgtccttcgacgactggagttcccgcttgatcatctccagctccgtgatatcccactcaatgctgacgatgataggagaggacaactcgtcaccatccaccttaatcttccgtttgtcaagaataatcagattcccgttcctgtcctttccctcagcgatccaatgcagtccttttccggtagcagctacctcaatatcctcctgcctcttcttttccgctacaatcggcggatagaagtcatagtcattcttgcccaccggattatcactgaaatgatcgcggttgtacgattcgcggttccgatacacatatctgaaatcattgttaatctctttcaccacaatccctgcgggaaggttattgatcgtcgtatccataatccggttgagccgtttgatctgcgcctcatacctcattctttccgagatgtcatgagcgaacgaccagaaactctcctcgccggaatcactgataacgttgtacatcgtacattcgtaagccagaatatccttatgaattctggagggatgatgcgcgataaacgtattgctgccgttctgcaccgcattcctgcaccgtttctgccaagcctcttcggtcggcatatctgcaacgatattatagattttcagtcggctgatgtccgtattatccaccagaccgtgattgtacagaaaacgtcggttggcaaagatcaccgtaccgtcgggtttggcggcatagatactctctttcgcattattaatggcatgagtcagtgtattgatatcattcctccggtgttggagaacagtgatattctggatatacccttctatattgcaactgccgtcgggcaattcctcccgcagataagtctggatacgcacatagaaaatatccccgtccagccggatccggtaactgatactttcctggttgaattccgacacattcttttcgcaccaattctcgaaagcagggtgatcctcctccattattaactgcttgtacatatcgaaagagatatgctgcacatcctccttgcacaatactcccgtgtatcctgtataatgaaacacattttccgccgtattatacgtccagtgtccgatttgcgccaccttctgaatctcgcgcaacgtgcggtttgcctgctccaactggcgtttcacgttacttctttgcgtgatatccctatattggcaaagcaccatatcatcatacggatgcatgagacacttgaaatagaatgtctcattcttcagctccagcttgaagtttttgctgacactccggtgttccccgatcaccgtctcgaacaccggcattaccttatcccttgtccgctctggcaaaagttcgaagatatccttccctaaaagaacttcttcctgcagaaaccataaatcgcaatgagaatcgatatccacgcagataccattcctgtctatcagcaacattgtgtctgccgtcagttccagaattctttgtgcattgtttgcattgtgtaatgttctgtccatgtatgatttttttataagataacaaaagatatctcaaattgtttttacttctccgaccgtttcgctttttcccatgctccgtttccttttttctttttcaggtaacggatccctttcaacacattgatattcataaaaagaaaataataagggatgaagagtatcttgttcttaatctgcctggcagacagataatagccccaatatcccaacccgtagaagaggagctgcatcccaagcagcaccccgtagaataccgtcggaccgcccgacagcagaatcgctacgttcagtggcaggagtgcgaacagcaggaacggagtgaccgaccacctcaacacccggtgcgacgtatattgaaagctgagcaccccgtagcggaacgggttcagcaatgggcgcagccgccagatagactgcaatcctcccgcagcgatgcgcacctttcttttttcctcctccctcatatccgccgaaccgctttcgatggcgtaggcattggtgcagtaagcaatcgtgtaccccttcatcgtgatgcgcagcgataggatgaagtcgtcgagcaatgtgtccggttccatcgcctcgaacagttcgcggcgtacggcaaacagttcacccgcagcccccaccgccgaatatagccgtgcgtccaacgctttcagcgtcgactcatacttccagtaaatcccttcgccaccggcggcagccccgtccttcgtctgcacggcaatccgtttctctcccgccacgcatcccactttcggatcctgaaaagcgagtacaatctcccgtatcgcttcccggttcaccatcgtattggcgtccgtgaagacaacgagcggtgtgtctacaagcgtcattccacgcgtcatcgcagccgtcttaccttgccggagcggttggaaatgcaccgtcgcctttccctgccagcgtgtctgcaagcgttcgttcgtcccgtcattgctgccgtccgtcacccagacaatgtgcagcttatccgcaggatagtccagctcaaggcagttctccatcttctcgtccaccacctcctcttcgttgaaagccgtgataaacagcgtcacctccggcagttccccgtccgttgccgggagcgagcgtctcactggtttcacgaaaaactctttcagcttgacaaggatgtaaagcaggattccgtagcccagatacgtgtagaacacaacaaacagggcaaaccagaaaagaatttcgagacaaagagtaagtgtatcgttcatgattttttagcttttattcttttagtcgcatatactcctccaagcttatcggagagtgcttatgggttttattttttactttatttttcacaatataatataaagcggtaccgatctttgtcagctctttcatcgcgcttctgcgcggatacatctgttccaccatctgtctgctccacggcttagtgaaaaaatcggtatacttttcatctgtcggattgatgataaattcgatatcatctttccattcgcatcggttcaacatcagattcccttcggtaaaccacaatagcttatacgtcagcgactggtatggcagataattcagaaacagttccccatagttattctcgtaatttcccggcattctggatttctcaaaaaggatcagtttgttgtccaagtaaagaaccacccatttgtgggatttcttgggaaagagaaattcgcccagcaaactgggagtctccatgtatccccttttcgctaccctgtattgctcatggataaactctgcggggttttccacgtgctcaagtacttgattgcaaatcacataatcgaatgccttatcttcaaacggtaaattctcaccgttcgcattgaccaactcctgatgcgggtatatcttcacgtttccgcaacgatggaaattactgtccaaatactgctcaacgataacgttggctctgaaagtcggattatgaccgggaccaacttccaataccttgtccttctttccgatcttcaaatcatctctgtcatacgggatacgggtaatcataatgctatatattatttgtttgggttatttctctatatctttcctttatttctttttcacgagattgctctcctcatccttatattcctttttcttggtgaacagtcctccgatccccctcagcccgttggccacacgaaccttgaaactgttgaacagcgatccgtcggctcccaccgtgccatatcccgtgacggcacgtgcgcggcgttttctcacaaaagcgattttcccgaactgtttcagttgcagtgccagatacccgtcctcgccccggatgatgtctgtgcggatgcccgttttccgtgccaaatccgtgcggtaagcgaacaccagcccccgcacactcagctccggacgcttgaacgattgcagccacagatgcaaatctcgggtagcctcatacagcttcagtccccaccgggaatgctcctcgtccggaatatagctccatagcgagcttaccccgacaacgcccggacgctccagcgcatccaccatcgtctccacatatttgggcgggtacatcgtgtccgaatcaatgttgatgtgatacttcccccgtgcgtggttcagcccgcaaaggcgggcaaaaccgcaactatgctgcgtctccgtataataaggtacgccgcacgcctgaaaaatctccgccgtgcggtccttcgattcattatccaccccgatgatctctaggggatatttgcactgcatctcgctcagcgaccacagacaagccagcagatgtttttcctcgttgtagcctatcagcgagacggtaaccaccggattctcgctctgaagcccggcgatcttctgccgcacttcctccaccactgcttggggagcttccgcaaacggtctctcgtacacctgcaaatatttcttataccaaactcccataactcacttcctgatttatttatcgtaccgcctatctgtttatttttccaaagcctcctcgaacaactctttccattgctccgcgatatgctcgatcctgaaacgttccacatccacccgtgcctgccgtcccatcttcctgcgcaggtcctcatgctcaatcagataacagatcttctccgccaatccctcgatgtcaccgttctccaccaacaacccatttcggccgtctgcgataatgtctctcggtccgcacgggcacgtgaacgaaacggggggcaccccgcacgccatagcctcgatgatgaccattccgaacccctcatagcgcgaggacaggacaaatacagaactctcacaatacttatccacgatattctgcaccgtgtgtttgagcaggcaactcgaagccaccccttcctcatccacctgccgttggagttgctcgcgcataccgtccccgtagatcgacagcgtccagtccggatgtttccggctgacgatgcgccaggcactcacgagacggtcgaatcctttctgcggcatataccttcctacggcaatcacctgtttttgcgtgccgtccgactgttggtcggggaggaaaggaagcgggttgtgaatcaccttcacgttgtccagttccgtccattcggctgcgtcctcgttgctcagcacgacgaaatagcgcactttccgcagttgccggatcagttgccgcatccaatactgcttcaccattcgctgcacgaatccggggaggcggttgtcggtgaactcgcggtagttggacttgttgaaatggatttctcccagcttgacactgccgtccttcatatcgcagatgaagttgatctcacgccgcagcagagacaccgtgatatccggacggatttcgcaaaggcactcgttcagccgcttcttgtaaagccgttgtttcttcgaatatcccgaaatacgtttcagcaatgaacgcccgtacatttcgtcgtaattgatactgagttgatgaagcgtgatggacggatgcagaggatagtaaggctctttcccttttccgtccgtcaggataatatgtatgtcatagccgaaatgctctgcaaagtaattcgctttcagagtcagtgcccgttccataccgctgggataataaagcgaaggaatgcagtaggctattcttaattgtttattcatcagttgtttttttaagtcctacctcctcaatcaccttttgcatctgcgctttccatgacagtgggcggaccgactcccggatctcaaccggcgaaatcttcaacgaccgttgaaacgcaatcagcttcgggacgtccaccgccgactcatctgcaggcaccttccacacatacggcatagcgtcaaaatccgcatccgtctccgagtaagtgaaggcaaacccgcgtgccgcgtactcccggtttttcagtgtcttgatttccgtgataccgctccggtggcgtcccagactgccgatggcaaagtccgcgcgttcaaactgctcgtcgagttcctctccgtgcaggggtccgtgcagaatcacgtactcctccagacgatggtcgcgtatcacgggaagaatctcctcccgttcccgttcgcccgatagcggacctacgatatggaaataaaccttatattccggattcgtccggtaatactccgcgaggccccgtaccaggcggtcgaacccgtgccaatagtgcacctccgccacaccgatcaggtgcagctcgtgcgaagtgccgttctgtccgctccgcatcggggtagcgtcgaaatcgatcccgttggaaatccggatcgtcctgcctccgaaaatcgtttccgcgctggagaaagtcacgatgccgtccagcagcttcgccatccggtggcggaaacaacggtccacagcgagcgaagccctcatagaccatgagatgtactcctgatcgtaaggatatgtcggtatctccaccgccactttcgcccccgtctttttcaggcgttccaccagccgcagcgtgaaagggttggcgttgtgataggaacggatgtacacaaagtcgatcttctctcgctgcgcatacttcacgataggcgagtagtagacacgtttcagcaacttcgccatcgtccctttgccgaaatcggccatcacctcgtcgccgatcatcagtcgccggttgccgaaaggcgtggtggcgtagtagcacaagcggacatccgcgccgcacttttcgagtgccttcacttggtaatgtatcttcttgctgattccgtttgctttgtcgaaaccgtgaaatatcagaaataaggctttcatgcgtgctctttgtcttgatgtatgttgtctattccgttcatttattttccttttcccgccatgcttcgtattttccccaagaggtcgtactcccgcgtaacttgtatatatcccccaaagatagtaaaacttactatactttttacaattattgtaagaaaaatatttattccttccgtcgcgtactgtatcggcaggagaatggccgccatcagcaggcttaccgccatcggagaaaggagctgacggacgaacggcaggacgcttcgccggaaagtcacccggtacatctgccagtagcattgcgcgaagttgacggtgaacgtgacggcgatgcagcttgccactgccgtcagcgtgccgaaatagaagattccgagcagcatgcccgccacgttgagcgcggacgagaacagtccgcacacgaacagactcttcgtgtcgcccgccgcctggaagatggagccggaagaagacagtatgatctgaatccctacggacagtgacagaatccggaaaacgggtacggacggcagccattggtcgccgaagatgatcagcgtcacttcctccgccgtgaaaaagagcagcacgctgagcggtagtccgatgaaggcgagaaagcgcaggatccgttcgtaggaggtggcgagcttccctttgtcgtcttgaaaatcgctgaatatcgggtgcatcacgggggtgatcacttgtgtgatgttctgcaggggaagcatcatcagacggtaagatttttcgtagtaccccaagtcggacattcccatgtatttgccgatcagcagcttgtcaaggttgcggctgaaatagttgatgacattgaacaggaactggtaggcggaataggagaatatcttgcgcagcaccgtcaggcccagcgtgaggcgcaggcgttgcggatagcgttggtaggagatggcgaatatcagtatgctggatacgatcgggttgataatcagcgcatacagtcccgctccgcagagtgctgcggtgacggctgccgcccctgccgaaatctgaatgacgaagctccgcacggcaatgaacttgaactccttgttgcggtagaacaaagcccccggcacgatggtggcggaagcgaaaaacaggttgacggacagcagttggcacagtgtccgcaggatgtcgctgttgtaataatcggctatcagccatgacgcggcgaagaagaggacgcttatgcctatgccggtccacacggtgaacgagaaaatatccgacaattcctcccgtgtcagcgtcttgtgctgcacgatggcgggggatacacccatgtccgtgaacaggttgaagaaggcgatgattacggtggctatcgctacaatgccgaagtcgtccggcgagagcaggcgtgccagtacacccgccaccacaagcgagatgacgacaccactgtatttggcgagcgctgtgtagaacactccggagaacagctgacttttgagattatctgccatttatcgcgtctttatagacttgtgcatactcgcgtcccgtttttttgatattcatgttttcgatggcgtagtcgtagtttgcctccccgtgttcgtaagcggcataccgtgcgccggtttcgagcgcgtggacgatatcttcccggtcgtcggggtcgaacgaggggtttccggtgatggccagcagctcgccgttattccccgtgtcgggacccaccaccactttgtggtagaggaaggcgagggggatgttgccggaattcaggatatctttgcgtggaatcattaccaggtccgaagctgctatataataaggtaggtcgcaactgtccaccaggtcgtcgttgcctccggctctcagatgcagccaacggttgagcaggggcctgaccacgtagtagccgaagcgcgagagccatctcttgaggaagttcttgccgtacctgttgcgtctggagaaagggtagagacggggagcgagcagcagtttatgcggccgtttccatgcatggaatgctccgagcaccatgcgtatctcttcccggttgcggaatttgccgaaggcggtgacgatgaacgcgttctgcggcagattgagatattggcgtgcgcgcgcctcgctgatgtcctcctgataggtatattcatagatatggtggagaatgacgacattccggctttgggggtatctggcggcaaagtcatccgcgctgaaatgtcccatgtgtaccacgatgtcgctttgcgtctcgatgatgtcgtaggcgcggctgatgatgtcgtttgcgtagtgcgggcgcacattgtgccgcgtgtagacgaaatgcgccccgcgcgaacggaagaaacggatgcgctcttcgagtcggcgtatcacgtcggggtcttcgcagttccagcctactacttcttccggccattggaagtgtatgatgtcatacgccgtgtctgattcccaaaatgcttctttggaacatcgtacgtcaatacccgtcatgcggatagcatcgcatagaataggagcgaacagattgtccgtatcacttatttctctgaatactatgagcgcttttattgccttgccattcgtctcttcacaatcgttcatgtccttgcttttgtatccttcttgtgctacaaaggtagtaaacttatgataactttctctgtttttccgatttcttttttcccttatttcctttatctttctcttttttcttcttttcctgttcttttttctttccctttccctttttcttcttttcattttccttttcctgttcttgacttttgcttatccgcaggtgcatggatttgctcagtaacgcctctctcgcctttgtcctccgctccagttcttccgcgtcggggtgctgttcgaggaggatttcgccgggaaggtaatcgtccagtttgtcgggatctacggttttgatgatgatgcactgcccgttttgaatcgctttgatcatcgcctttgaaagatgcaggacgtagaaattgcacttcaaggctatgaaatgcgtgtagatcacttgcgcgtacgataatatgctgtaattccggacttgttccatgttccatgtcgtgctggaattgatggtggtctgtcccgccactttctcgtgcgacaggggcgatacggtgcgctggatgttcagaaaacgtcctaacgtgatgtggacacaatatttcaatctctctttgattactttgtcgtcattcaggatgacatttgacttcattttcatttaaaaaacatttttatttatggttattatattgctgcaaaggttgttaaaagaatcgtaatagccctctgtttttttcaacaagtgtaaccaaaacatttaaaatacctttgcgctcactgagttagctcgtccgaaaaggatgattttcgtgaataatttattaaaatagaaagaataatgaagaaggatcagtattttaatctggaagtaaatctgctgaatgacgataatatcgccggtatgatgtcggaactggatgcggcggaagcgctcggcatttatgtgatgttgctgttgcacctgcgcacgaaagataattatgaggcgtcgtgcactccgcttttgttgagggcgttcgcgcggcggcatgaccttgagttggatatgctggaaaaggtgctccatgattataatctttttgaggtggacgaggagcggcagacgttccgggctccgtatctcgaccgggtgatgcaaaggcttgaggaaaagtggagaatggataccgaaaacggtaaaaaaggagggcgcccgaagaagcgtgcgaaatgcgctgaaacgcccgccaccaaagggcgaaaacccaacgaaacccaagagaggagagaagaggagaagataggtattactcctgttgtaaacaacagcagcaataccctcgcgggaggagctactgacgctgctatggttgtggcggagattcctgctgcggctgctacggggaattcggggagttcgagaacttcgaggacttcggagatgacggttattccggaaacggaggagaagatttctgcttcggggacttcggaaacttcggaagtccgaactgcttcttccgttcctgttggaaggggaatgaggattcgggcggtggatgaggaggggcagcaaccgttgcagccggtgctgtcttgggaaacgctggtagaccggcttgccgactcacgcttgtatatggagctggcggggcagcgttccggtctgggacggctttttatcgaccatcagcagcagattatcggtctgttcaaaaagcatatccttctctacggaaaggagagcggcttgctcttctttgaggacgtgaaacgctatttttccaattatatcgctgccggatcgcctacttgccgtatgctgcgcgaagagttgatgcgggaaatcaaggagcgggagagcagggatgtgagccgttttgaaagtgttgtggatggaaaacggatgtatctgggacgtcttattcccgacagcgcaccgccaagacccgacaactcggcggtgtgggatgatgcgcacaaaagatgggggcattagttcatcctacgtctggacaccattcatcccacgtctgaacaccattcatcctacgtctgagtgccgttcaccccatgcttgaatgtcattcatcccacgtccgaaagcggttcatcccgtatttgaaagtatcaatctctccgtgttctacacgaagcgtttgtcttcctttccctgtgtgtgggaaatataattattcatttaaaaataaagcaagttatgagaaattttgccagttacgatgtcgatgtccgtcggaggacaagcggcgtagtgaaaactgtttgtaataaatgtcaggccacgcgccacaacaaacgcgaccgttcactgcgtgtcaacgttgatacggggcattgtcactgttatcattgcggggcggacttttacgtccccgacgaagcggaagagcgtgagaaagccgaacggcgtgctgcccgccagcgtcgtgcggcagccgttccccgtcatttccagcgtccggtgttcgatccggcacggactacgctttccgaatctgtagaacgttggctggtggagacacgttgcatcccgcagggcgtcatcgccggactgcgcatcacggaacaggaggaattcatgccgcaatccggtcagaaggagcgttgcgtctgcttcaactatttcgaggacggacaactggtcaacacgaaattccgtagtgtggacgcgaagcatttcaagatggttcagggtgccgaattgattccctacaacatcgactccgtgctcggacagacttcctgcatcatccacgaaggcgaactggatgccgcctcttcccttgccgccggattcaagagcgtgatttccgtccctgccggagccaactcgaacttgtcctggctcgaccgtttcatggagacgcatttcgaggatttgacggaggttatcattgccgtcgataccgattcagccggactgcaactgcgtgacgaattgatcaaccgtttgggtgccgagcgttgccgtgtggtggcgtacgggcccggctgcaaggatgcgaacgagcatctgtgcaaatacggggttgccagtctgcgggtagccatcgagcaggcggcggaggttccgctcgaaggggtgttcacggccaccgacctgcacagcgacctgcttgctctttttgagaatggtttcggaccgggcgcggaaaccggctgggaggaaatggacaagatctgcacttacgaacgggggaggcttatcatcctcacgggagtgccgggcgcgggaaaatcggagtggctcgatgagctggtgttgcggctttgtctgcgccatcagtggaagatcgcttttttcagtccggagaatacgccgattgtctatcacatccgaaagttggtggagaagctgaccggacaccgttttcagaaggggtgcggcatttcggaagggctgctgatgcggtcggaggagtttcttaccgataacgtgtcgcatatctctctgaaggggaacgccacgccggagcgggtgcttgcgaaggcgcacgagctggtggtgcggcgggggtgccgtattctggtgatcgacccgctcaaccggctcgaccacactccgcagccgggacagacggagacgcagtatctttccaatttcctgaatatgattacggaatttgcggtgcagcataattgcctggtggtgcttgtcgcccatccgcgcaagatgaaccgtaacccggtgacgaacactactccgcgcgtggagatgtatgatatcaacggctctgccgatttcttcaataaggcggattatggtattgtggtggaacgtgacaagggggtgggggtgacccgtgtgtatgtggataaggtgaagttcaaacatctcggaatgggtgggatggtgactttcgcgtatgatcccgtgagcgggcgttacctgccgtgcgtggaatcgcatgatccggctgttcccgtagaacagcgcgtcggaggtgtgacgttcgactccagttgctggctgccggataaggagctgtttgagtcgtaagcggcactcgtactcagggttcttgcagtacttctacgattagccgtacttgtgcgggggtatagcttctgcttcggggattcatgccggtggcgatgagtcgttctttcagtcccggagcggcggctatccatttgttgaaacggtctaccgcactctgttgttgtatgtcggggaggtacaacatggcaagctccccttttccgtagcttcggtattcaaatgttttctctttcttttcgtcatcggtcggctctgcatctgtcttcattttctgattgtttttagtccgtatttatagagtgtaaagttacgcttttttaccggatttgccaagctgttcaggctgtttttggggatgagataaaaagaaaatgaaagaaaatataggttttagctattcttttcttaactttgtgggagaggaggaaaatagcttatgaaacgtacagatattgttcatcgtattgcagagacaatgcatcgcatagcgcctacggcacgtaccatactttatggctcggaagctcgtggggaagcccggcatgattctgatatagacttgcttatcgtagtggatgagaaggaactgacaccggaaaccgagcttactttgcgccgtcctttaagcgaactggaagcgcaaacgggggtagctattaatacattggtcgtgttgaaacgtgtatgggaaaatattactacaccactgacacttaacattaatcgggaaggcattgtgttatgaaagtattatgcttgttattatgccgcgtctgctctgttgttgaaccgtcatattgaggctaatacccataatggagtaaaaacacaactttcaatgcattttgtccggacgggtttgcttgatttggaacatagtacaactttcggtttgctttttgataaacgccatagtagcgactatagtgactttgcttattgtgacgctgctctggtggatgtgcttcgtccgcgtgcggaagcattcattaatgctgtggagcaattggtaagaagtgagcgcacagcttaaaaaaaactgttttttgctcttattccttgttatcctttcttaatcctttctaatccctcctagtccggtgtaatccgttaatccgtctttcggttgtcgtacttttgttgtaccaacagaaaggaagaatgtccttcttttcgtagaaacaacaatttttatggcaacagttacagtggtgcgctataagcgcagaaaacgaatcagcgatgcggattcgccgatggtatttgccctcaaacctaagtcgggggagtcaaaaatctattcaatagaggcgctggcgcgcgaaatcgaaacgatcggttcgctttcggtggaggatgtgtcgcacgtcatgaaatcctttgtccgcgcgatgaagaaagtccttgtggcaggcaataaagtgaaagtggaggggttgggaatcttctataccacgctgacctgtcccggtgtggaattggagaaagactgcaccgtgaaaagcattacccgtgtcaatcttcgtttcaaagtcgacaattccctcagactggcaaacgacagtacggccactactcgtggcggagataataatatggtgtttgagttgctctcggataagaagaacgctgcgggaggtgatggcggcagtccggacaacccgaatggttctggcggaggagaggacggagataacaatggggaagctccggatccggcggagtaatccggcggggatgttctacagatatattccgcagaaatgtcttacggagcaatcctgcaggatctccgatgtttcagtattcagtgaataaataatcaattaaaaatgcaaagctatggttgacaaaatcttggaagttgtattggaagtgttgtttttctttcgcagaaagagaaaagctaaaagaatgaaaggacaggttgatgaggaagattgacctgattgtgatccactgttccgccactagggcggacagggatttcacggaagacgacctggacgtgtgccatcgccgtcgtggtttcaacggtgtggggtatcatttttatatccgaaaaaatggcgacatcaagtctacccgtgaaatagaacgtatcggagctcacgtgcgtggctataacgcccgttcgattggcatctgttatgagggtgggctggattgtcacggtcgtcccgccgatacccgtaccgagtggcagattcattccatgcgtgtgctcgttctcgcgttgctgcgtgattatcccggttgccgtatctgcggtcatcgtgacttgagccccgacctgaacggaaacggggagatagagccggaagagtggattaaggcgtgtccgtgctttgaggtgaaagaatccgacttcttctccggtcaagagtagaatggaaaacaagacttgcaacactggtattcagttaccggtgttgcaagtctttttatatattttctttttcaaatgaggaaaagtggaattttatttgttactttgttgataggaaatctaattttgatgaggatgtttttcgacaattataagcaacatacagatgcgcagatacgtcagtccctattttgggagtatgatatgtcacgttttgattgggagaagatgcgtacgctggtcgttcagcgggtgattgaacgggggcggaaagatgatttctttgccatcttaaataggtatggagtggaaggagtaaaggaaagtatcaaggaaattccgacaatgaacgcgaaagacatttcttttgtctgtgccgtgtttgacttaaaaaaggaggatttaaaatgttacacaaggaaactgtctcaccctcaacattggaactcttgacaacgttaatgaaagactgccgactcaaacactttgtattggtgggtggaacttcattatccttgcagttggggcatcgtataagtgttgatttggatttgttctcagatttgtcgttcgatgaatccgaactgtcttcctatttggtggaaaattatgatttagagttggattttatttccagaagtacgctgaaaggggaaattagaggggtccagatagactgtatttcgcaccaatatccttggttgtctccgtgtgttgaggaagatgttatccgtttggcttctcctgtcgatattgctgctatgaaactgaatgctattgcgggcaacggcactcgtataaaggactttatcgatttggcctatctctccactttgctttcattgggagaaatgctggaggcctatgaacataaatataaagcaaatgtaatcatgcctctgaaggcccttacatattgggaagatattaattttgacgaacctataagaatgctgggctctgcacctttcaaatggaaaaagatagaaaagagattgttgcaaatgcagaaatatccacaaaagagattcgatctttttccataaatcagagctttgtccagcgatacggttatacgtgcttttccaacgccatattcctatagatatcgagcaatgctttcgcactgttcttccatgagaacagtttgctgcgctccactccgcagtccgcttgttgccggtaaaattccgcatctccttccaactgaagaatcttcgccgtgatgtcctccgaactgaacggatcagccagcaaagccccttcacccgctatttcgggcattgccgaagtgtttccggcaatgacaggcgtaccgcaggccattgcttcgagcatagggataccgaaactctcgcgaagagagggataaaggaatgcgaatgcaccgctatacagtgccggaagatcggtattcgcaatatatccgggaaaacggaggtagcctttgatgtccgtaatcttctcttcccccagtatccggtcgatagcgtcttccttgagatcggctatgagtagcgggagcttcttctgcgaacgtttcagatagtcactgtacgctttcagcactcgcggcgtattctttttcggatcagtatttcccaagaaaaagagatattcgtccgcatctatatacttccgggtgatttccggagctttgggctgaagatggaaatggctgttgaatccgttgtatacggcaaccaactgttcgtcggacaggtgcagagcatcgaggatacgctgacgttcaaactgggaaactgtaatgattttcttgcatttggggagtatgcggggcactatcaggcggcggtaatgccatcccatctcctgatatagcgacaggctggacgattggcgtttctccagataaatgatgtcgtgcagcgtcagcaccaacggcacggggcagttcaacggagccgtattgctggtacaatgcaacaagtcggggcggatgcgcttcaccgctcgcggaagagccacctgttcccacaacggataggtagggcatttcagttcgatgacgtgcatattctccgaactcttcaggcatttgtcttcaccgggactgacgaaaatgaaatactcgttttcgtgatccatcttctgtaactcacggattgtttcaagagcgacgaaatccattccatgtttgttggggcggaagatgcgctgtgcttcaatggctattttcattgctttttgtttgggataatgtgtttatgaatgagagtgatgttcaccgtgctctgtatggatgaacttcttatttgctcctttaagtttgaataaattgcctgtcatggtgacagccagcatgggtaccttcatgatggctttccctacctctttggtaaacagttgccctcccggtacgggtagaatcatggcggagacctgtgctaccgacagaatccaccatttgatggccatcgtccattcatttcctccattgcgcaggctcatgacaagaccgataacggtgaaaacgaaagtcagtccgaacactcctgccaactgtatcaggcggggaggcagcatccattggaatatcttgtcgcaatagtctatattgccttgcagcagggctttcggcaggtggggcaacgaagcgcggagtgctccgaactgcgccgctatccaacgtttgcgctggttgctgatcgcttcttttttctgtgtcttctcatcgaacacagggaggtcgttcagatagactgtatggatccgttgctgcaacagcatggattccagttctttgtcttcgcctgccgtttgcaggtattgcacattctgttgaaaccattttgcatcaaaggccattcccgagccggataacccggcggaaagtccgagcgcgttgtgcccgttgcggaagaagccgttgttgatctcttcgctcgcgctgtccagaatggagatatcggtattcagattcttacctgtccggtgagcctgtatggatcttacgccactgtcgaacgcacggttgatgcaggacaggaattcggggacggtcacgttgtcggcgtccatgataaccactatgtcatagagatcggtgtcgatgttgttcatggccatagccagcgctttggctttggagctttccgtgtaatccgccatcagtagccggatggggagcgtgcgtaaggcttcgttcgtttccggttgcatctggtcggaaatgacgacaaggtcgaacaactccttcggatagtcctgctcgagaaaactgcggaccgaagagagtatcacacggtcttccttgtaggcggggaatagcacggcaatgtgccggagcgtacgggcttcgggatattggggagcccggtagaacttggaagcgatggcgtaaagcagcaagtagcatacgcatagcgtgagggggatgtagagaacccagtcaatgatgttcatagtattcgtttttttgttcttttgtttctttggtggccgacggaaggatcagtcctgaattgacgcctctgcagacggccaggaagagatcgaagcgtccttttaaagcatagagcagaccgttcttcaaggctgcgacagtgctttgatagagcacggagcccagacgtgcggctcccctcaggttgcggcgggcgtagagcaggcggttgcgggtcagataataggtacgcagccgactgagttgtccggtactctggctttctttgtggaagaccgtgcaacggggctcgtaccatagctcgtagccggcacgtgtcatgcttgtgctccagtccagctcttcgtagtacaggaaaaagatctcaggcatcatccccgctttctcgactacctcacgtttgatcatcatggctgcgccatgcaggtagggagtggggtggggagtgtcgtatttcccgtcatcgggacagccgaaccccaacatatggttacgtaacgtgattcgcgacaagggggtgaagcctgcaaactgtatgtgctgcggcgggaaagcgaaacgtattttcggcgatacgcctccgatttcgggacggctttccagccgttctaccaggcaggagattgcgtctgattcgatataggtgtcgttgttaatgaagaagaggtattttcctcttgccgcacggattccgatgttattgccgccggagaatcctctgtttacctcgctgcggatggcgatgactgaggggtatagtctggatatcttggcagcctcgtcctcgtgcgaggcgttgtctaccacaatgatctcgtaggttacggaatacagtttctcctgtaacgattctatcagctcgcaagtgtctttgaaaccattgtagcagatcgtgataaatgatatgtccgtccggtggctgtctgtcattttttttattcgtttggttctttaatcaggtgcggttcttgtttctcactttcctccggatttttactttcctccggctccttaccgatgtgtttgtctatataaggtgcggcgaggcagagggcgaagcctgtgtatacagtcagttggttgggatattgcatcacgtcgttgacgtaggcggcaatgaagagtccggcattcatgcaaagccatgccgccgccagtcctcgtagattcttattgcgtactttgaacatcaggagccatgaacaccaggcgaagagagtgccgtgtatggcaagataaagtatcagccctacaattccggtttccacccagacggcaatcagccacgagtcgggtggataaggcatttgttctttcgaatcgaagtttcccgctttggccagcccgattccatagcctatcggtttccttgccatcagctccttcatccgctggcggttttcgacacgcacgaggtaggaggcgtcttcggtgggatggaaggaggagcgcatcttatggatatactggttgccgctcccgatattggtgtaatagaaaaatacgaaaatgccgatagatatgaatattccccctagcaacgctttccagttcttggctatgatagtaatcatcagcataccgcccatgagcactcccatagcggaacgggttccggaaatacccatgccgtagataccgcacaaggctataaaaaggaaatagaggcgcttccatctggagtcgataaagaatgcggagatggagaaggtgacggctgccatcgctgagtgcacaccgtagtttgccgcgtccgaaaaacaggaaaagtatcgtatgcccgaccagatgatgtgggttcgcgcaccgccgagaacgtgcaggaagtaaaggtctttggtgctgaaaccgtgatttttctgccagtatcctttgagggtgaagatgatgacgaacacggaccatacgagcaatagcagttctatgtctttcctggtacgtatgacgaccggaacgacaaatgcgcatatcaggggaatgagcgcgtagggcgtgatgttgatgttccatgcctccaacacgcagttggggttcatgatctccatgatatagtacaacagccagacgatgaacagccaggtcatgatgttttgcccgcgcttccattcggtggacttgccgttactgagctgtatcaggcaaacggtagtgagcaacaagataagaaccattgagaacagtcctgtcttgacgtttacaagcatacttaccgctattagcgcgaattgtgcggcaagcaggatatggaaagtagtgttcctattcgtcatcgtcctcgtcttctgcttcctttgcttttcttctgaggttgaatatgattttttctgtcaatgacaactggctgaagtgataactgaacctgcgcaacagggtatatggcggcaactgtccggtgaagtcttcggcagcttcacggctggcgttggtcaggcagatgcggaaaggcacattgctcttgcccaactgcaacatgagctgctcgcatagttgcttgtctatcgttttccatccgcgattggccggagtcaccagtatattggcgttggcgtcatgcaacagggcactcgatatgctgctctttgacagaggaggataggcgacgatcagtacgtcttctccttgcggcgtatagaaatccgtgacgttccttgcaagcaggtattgggtggatgcgatgtcaaaatctttattgtagcagatgaacttcgtgttcagtttgcggctttgcatgaatccgcagatcagtgtcccgattatgtcttctccggaatcctcgctggtgctgaacaggttgatgataaacacaccgggggatttccgcttgctcaggaagcggagcagggagttggtcagctctcttacggaaagttgtatgtacgttctggtcagtcctccgtagcgggcggtcgaaaggctgggaacggcacctatcaccttatatcccgtcacccgcagggtgcggctggcgtcacgcagtgttctgtcaagcaattctaccaataccagcaaagctatgataatcacgaagatggcaatacaggctgctatgacgatctgtttccggttggttgagttggctccgatcggataggtaggctcattgaggactttcagcgtggcggaggtcatctccagattctttttcctcaataaagcttcgttgtaactttgcaggacggtcaggtagctgcgttcagtgaagttgatgctacgttctttctgcttgatggtggtacccacaggtgcgaagaatacgtaacggttgttcaagtcgcgacgggcgctttgtacgattttcagttcggctttcgccttctcgtagagcaatgtctgttccagccattggtcgatgatattggtgcgcgacgcaccttctttggtatatttgtgacctacgtatgaggtggtcagggcgttcagttcttgtttaagctcgttcaaccgctttttgtctccttccagcgaatggaggtctttcttgctggaatcggtcattgcttcggcttccgatatcttgccggtgatgttggaggcttcgcgcagcttgtctacgaattccatgtttttcagtacttgcctggcgttgctgtccatgtgtttttccaactctttgagcatggacgcggtgctgttgaatgcgaaaagcgcatcctgttctctcagctcgaattccttgctgatggcggctatttccttggtctcgtcgaggtagttgataatacgtttttgtacattatacttcgtcaggtcttcttcttccgctctcagttgcttgccgatacgtttcagctcttcttcgaaatacttgatcactttgtccgtctctccgtaacggatacggcggtattcctcgacaaactcgtgcatcaggatacttacggtgttgtaggcgatacccggatcaccggaagtatagctgatgtccaacaggtcactggtgaggcggcgctgtacctttacatttttcagagcaccgtagctgtaatagggatgggaataataaaagagcccgtagatgtaattgtccttgtgcgggcgcatatatgcttccagattggctactgtcttatcttcgctcgatttgtcgatcagtttcagtatctcgtctcccggagggctgtttttcagatggttgtatgtgtagttgtagctggcaggggtgattccgtcattctctttttcaggattccctttgatcagtatgcgggcgaacaatcgcagactgactcttttcagcgtactttcggcctgcatgatactgatgaggttgtccatggagttctgcacggttgcccaatcggtgcgtttgtcactttcgaggttgtagcccgaagcaactcctgtgtaaagggttgctttcacatcatacccgcctcgcatatggcgtgtgtaataaatgaccagtaatgtgaagagagtggtccctatcagtatcagccaacgatgccgaaatagggtccgtatgatggaaatgatgagattcatatcttagtcttttattttcgtataatgggcgtgcgtgaaataatttcaagcatcatgagactcttggttaactcgaacttgctcttttcatatgcttcacgggcttgcgactgcctttccttgtctgtcgccaagtcgatggattcgatggttccgttagcaaaattcttttcggaaatctcatattgcacgttcgccagcaccagaccctcgcttcgcatctgaaggactttgatctgtgatgtagccatcgcgtacatttcgattatgttcttcttgatctcatcgtatttgatttcccgctcaagctccgcgctcttcagattgagcttctgacgactgacacgcgctttgaggtcaaacaggtcgtccaatgggatgctgactcccgctcctaccgtatatccgttctgggcttgggtggagtaggtggggtatggctctacgtaaacgtctgtataggtggattcattgccgaaagtaccgtattggtagcttccccgcagactgaagaatccgagaaatgcacgcttttctttcgccagcagtttgcgctctaccgccgctttgacatctgccatctcatagatgggattgtctttggcattctcaaacaggacggagagtgggggaagagtgatattgctgtaatcttcttcgcttaattgagtataatcactgacctcttgcgcaacaatcggtgtgttggaggtgaatagaaggagtaatcctaaacagatatatataatttgtttcataaaataaccctgttatttgcttctgctgtgttttgttgtgacatagcttgcgcaaatataaggattaatttcatttatgaacagtcttttgttgtctattttgcattctttcttgctaatttgtgctagaagggccctgacattggaactagaaggcctctgtcacgttgaactagaaggcctccgtcatgttgaaatagaataaattctgcttgttcaccatgtctcttcccaagtcgagacgtacgttcatgcggggctggacttcaatacgcaggccgactccgagattaggcaggacgccttctatctttcccggtgtgggtcccatgaatccgcagcctccccaggccacatatcctatgtggctcaacatctttttgatccatgtgcttttgtctgtatttatcatctggcggtattcagccatcattacatgagaggacttgtcgcggaactgtcccatgtaataaccgcgaaggtcgaaaggggttccgctcaatacatatttcgtcaaaggaacgtctccgaatgcgtttttgctctgtacggtccaggcgagaactttccgttttccgaccgttttgtattgacggtagtctatctccagacggtaaaaattgtcgtcacctccgaaagctttgctgtacatcatcccccgaaagtcgaggtaagtgccctgataggcattggcaggcacatcgcgtgtgtcgtaggtcagcaggaatccgagtcccgaactgaaattggtgtatccatgctccgtaccgcctgctgcgatatatgacggttgctcaatcattcccgccgcaggtttggtaatcttgtcgtagttcaagtcaacctgaggacctgcgaagagatcgctttcccccaaccggaacagaaaccacggattcacctgaataccgctatatcggtattcactcgtatcttcccctcgcggatagtccttgtttgtgttatatccgataccgtagaagttttcgatggtgtttttgtaggagaaagtgccgaatatgcggaaacggtcgcctttgaagaagagttgcggctttgtcatgagattgagccctcctttgaatatcaacgcgatggacatgggtacgacggaacgtctctgggtggtgtcgctcggattcatccggaacgtcatcaacgcgctaccgcccaccagaaaaccgaaatcgggggtgtagctgggacctcccagaatgttgtaatgcaaattccgcttcgccacacgctggcggcgtaactcgcgtttggtatcttttaccgtccttgtactgtctgtctgtgccagcatgacaccgataggcaacaacgccatccatatacctattatatatttcttcatcttgtagagcttcggctgtttcatattctttcttaatttcaggatacaaagaaaacgcttttattctgattagttttcatattcatagataataaatgtaaattcgctctttttctttgctttcgggagaaaagaaagatggggtacgtgtgcgagcacgaagataattacggaaaaatctccgtaattactcccttttttcctcccgaatcccaatcttatttattacttttgcggcaaatttatgaaaccattattttatatagcatggcaaatgtaataaagttacgcaaaggccttgacataaacctgaaaggtaaagctgctgaaacgtacacaacagtgaaggagccgggtttttacgccctcgtgcccgatgattttcctggtgtgacaccgaaggtgcttgtaaaggaacaggaatatgtgatggccggtggacccttgtttatcgacaagtatcatcctgaaattaaatttgtttcgcccgtgagcggcgtagtgacgagtgtagagcgtggagctcgtcgtaaggtgttgaacatcgtggtagaagctgctactgagcaggactacgaggaatttggcaagaagaatgtggcaacgatggatgcggaggctgtaaagaacgctttgctggaagccggtctttttgcatttatcagacaacgtccttatgacattatcgcagatccgacggtgactccgaaaggtatcttcgtttctgctttcgataccaacccgctggcacccgattttgagtttgcgctgaaaggtgaagaagcaaatttccagacaggactcgatgcgctcgccaaactggcaaaaacttatctgagtatcagcgtgaaacagaatgctgccgctctgacgcaggccaagaacgttacaatcaccgcattcgacggaccgaaccccgccggtaacgtgggcgttcagatcaaccatctcgaccctgtctctaaaggagaaacggtatggactattgatccgcaagctgttatctttatcggccgtcttttcaataccggtcgtgtgaatttcacccgtacggtggcagtgacaggttccgaagtgctgaaacctgcttactgcaaacttcaggtaggggcgctgctcaccaacgtgtttgccgacaatgtcactaaggacaaagacttgcgctatatcagcggtaatgtgctgactggaaagcaagtgtctccgaacggattcttgggagcgttccacagccagttgacggtgattcccgaaggggatgatattcatgaaatgctcggatggatcatgccgcgtttcaatcagttcagtgccaaccgctcatacttcagttggctgatgggcaagaaggagtatacattggatgcccgcgtgaaaggtggcgaacgccatatgatcatgtccggtgagtacgacaaggtattaccgatggatatcctgcccgaatttctgattaaggctatcatcgccggtgatatcgaccgtatggaagcgcttggtatctacgaagtcgcacccgaagatttcgccctctgcgaattcgtctgctcttcgaagatggaactgcaacgcatcgttcgtgccggactcgatatgctgcgagctgaaatggcataatcgcccgactgtcggcaaatagtaaattgtaaatagtaaaatagtaaatatattaatgaaagcgttaagaaattatctcgataagataaagccgaactttgaagaaggcggcaaattccacgcattccagtcggtgttcgacggcttcgaaacattcctgttcgtgcccagcaagactgcgaaaacgggaacgcacatacacgacgcaatcgatagcaaacgcatcatgtcgattgtggttatttcgttaataccggctctcttgttcggtatgtacaacgtaggttatcagcatttcactcacacgggcgctaccggtagtttctttgagatgtttatctacggattcctggcagtgttgccgaaaattatcgtatcatacgtggtaggtctgggtattgagttcgttgtggctcaatggaagaaggaggagattcaggaaggattcctcgtttccggtatcctgatcccgatgatcgttccggtagactgtccgctgtggattcttgccgtagctaccgcattctctgtgatcttcgcaaaagaggttttcggcggtacaggtatgaatatctttaatgtggcattgatcactcgcgcattcctgttcttcgcatatccgaccaagatgtccggtgatgccgtttgggtatcgggcgacagtatcttcggtttgggacagacggtggatggattgacggttgccactccgctcggtgtggccgctacgacaggcgctgctcctgagttcagtatggacatggtgacagggctgattcccggttcgatcggtgaaaccagtgtgatcgctattctgattggtgcggttatcttgctttggacaggcgttgctagttggaagacaatgatttccgtatttgtaggtggcgcgttcatggcatgggtattcaacgcgatcggcatggaaggcaatgctatggcaaatatgccgtggtacgaacatcttgtgctcggcggtttctgtttcggcgccgtatttatggctaccgaccccgtaacgtccgcacgtactgaaaaaggcaagtatatcttcggattcctcatcggtgtgatggctgttgtcatccgtgtgctgaacccgggttatccggaaggtatgatgctcgccatcctgttgatgaacatcttcgctccgttgatcgactactgtgtggtacagggcaatatcagccgtcgtgaaaaacgtgctatcaagtctaaccaataaataccgaatgaaaatgaatacaaatagtaacagttatactatcatttatgcttcggtaatggttattatcgttgcattccttctggcattcgtcagctcttcactgaaagctacgcaagacaagaatgtacagttggatacgaagaagcagattcttgccgcattgaatattaagaatgtggaggatgcggatgctgaatataagaaatatgtgaaaggcgatatgctgatgaacgctgacggtacgttgaccgaaaacacaggagactttgctacgaactatgagaaagaagcgaaagagaaaaaacgtcttcatgtgtttgtctgcgaagtggacggacagacgaaatacgtagttcctgtttacggtgtaggtctttggggcgctatctggggatatgtcgcactgaatgaggacaaagatactgtatacggtacttatttctctcatgcgagtgaaactccggggttgggtgctgagatcgcaactgactggttccaacaggaatttgtgggcaagaaaacattggcgaatgatagtgttgccttgagtgtggtgaaacatggtaaggtggagaaagctgattatcaggtggatggtatctccggtggtacaatcacttcggtaggcgtggacactatgctgaaaaagtgtttgaaagaatacgtgaaatttttaactaaataatgaggaggagaaaaatagaatatgggacaattgttttcgaagaagaataaagaagtattctctgctccgttgggaatagacaatccggtaaccgtacaggtgctcggtatctgttccgcacttgccgttaccgcaaaactggagcctgctatcgtgatgggactttcggttacggttattacagcgttttctaacgtggtgatttcattgttgcgcaaaaccattcctaaccgtatccgtatcatcgttcagttggttgtggtagctgcgttggtgactatcgtaagtgagattctgaaagcatttgcatacgatgtaagcgtgcagctttctgtatatgtaggtctgatcattaccaactgtatcctgatgggacgcctggaagcatttgccatgcagaacggcccgtgggaatctttcctggatggtgtaggtaacggattgggttacgccaagattcttgttatcgtcgcgttcttccgcgaactgctgggttcgggaacattgctcggtttcaacatcttgaactacgagcctattcagaaaatcggatacgtgaacaacggtctgatgttgatgcctccgatggcgctgattatcgtcgcttgcattatctggtaccaacgttcacgtcacaaagaactgcaggaagaaagtaattaattcttcattcttaattcttaattaaaagatatggaacatttattaagcttattcgtccgctctatctttgtggacaacatgatattcgcgttcttcttgggtatgtgttcatacctggctgtatcgaagaatgtgaagactgccgtaggactgggtatcgccgtgactttcgtgttgctggtgacgcttccggtcaactatctgttgcagactaaggtgctggctgccaacgctattatcgaaggtgtcgaccttagtttcttgagttttattcttttcattgccgttattgccggtatcgtgcaattggtggagatggtggtggaacgtttcagcccttcgctctacgcttcattgggtatcttcctgccgctgattgccgttaactgtgctatcatgggtgcttctctgtttatgcaacaacgtatcaacctaggtccaagcgatccgaaatatatcggtgacatctgggatgctatctcatacgcgctgggttcgggtatcggttggttgctggctatcgttggtctggctgctatccgtgagaagatggcttactctgatgtgcctgctccgttgaagggcttgggtatcacatttatcacagtaggtctgatggcaatcgcatttatgtgtttctctggtttgaacatctaaaaagaaaggaataagacaatggatatgaatttaatattagcgagcattggggtattccttgtggttattctcttgcttgtggttatcctgttggttgccaagaacttcctggtgccttcaggtgacgtgaaactgacaattaatggcgaaaaggaactgaaagtggcttccggctctactttgctgaatacgctgtctgtgaatggtatattcctgtcatccgcttgtggtggtaaggggtcttgcggacagtgcaaatgccaggtgctcgaaggtggtggagagatccttccttcggaaattcctcatttcagccgcaaacagcagcaagatcattggcgtctgggctgccaggtgaaagtgaaaggggatatgtctatcaagattgatgagtctatacttggcgtaaaagagtgggagtgcgaggttatctccaacaagaacgtggctacatttatcaaagagtttatcgttgctttgcctaagggcgaacacatggactttattccgggttcttacgcgcagatcaagattcctaaattctcaatggactatgacaaggatattgataagagtctgatcggtgacgaatacttgcctgcatgggagaaattcggcctgatgggattgaaatgtagaaatgacgaagagacgattcgtgcctattctatggcgaactatcctgccgaaggtgaccgtatcatgttgacagtacgtatcgctactccgccgttcaaaccgaaagatcagggacctggatttatggatgtgatgccgggtatcgcttcttcttatatctttaccctgaaaccgggtgacaaggtaatcatgagtggtccttacggagacttccacccgatcttcaattccgacaaggaaatgatgtggatcggtggtggtgccggtatggctccgttgcgtgcgcaaatcatgcacttgacgaagacgttgcatactaccaaccgcaagatgtcttacttctatggtgcccgtgccttgaacgaagtgttctacttggaagacttcctgcaaatcgaaaaggatttcccgaacttctcattccatctggcacttgaccgtccggatcctgctgccgacgccgcaggtgtgaagtataccccgggattcgttcataatgtgatttatgaaacttacttgaagaatcacgaagctcctgaagatattgaatactatatgtgtggtcctggcccgatgtcgaaagccgttgagaaaatgctcgacgatctcggtgttccggcacagaacttgatgttcgataactttggaggatagtatctgagaagtgtcagaccggtcggtagggacgatcggcggataatataagacagagcgggaaatctgaaaaagccgatgtgcttctcagatttcccgcttctttttgttatctttgtcgccatgttagagaaaaatgaaattatacagtcagcccttcacaacctgaagattgaagagttgaatccgatgcaggaagcgtcactggaacaggctaccggaaggaaagacgttatcttgttgtcgccgaccgggtcgggaaagacacttgcctatttgttgcctttattgctcacgctgaaacctggcaatgacaatgtacaggttttgattctggttccttcacgtgagctggctctgcaaattgatagtgtatttaaggcaatgggaactgcttggaagacctgttgttgctatggcggacatcctatcgcggaagaaaagaagagtatatcaggcaatcatcccgctattattattggtactccgggacgtattaccgaccatctatctaaaggaaatttcaatcccgaaacgattgaaactttgatcatcgatgaatttgataaatcattagaattcggtttccatgatgagatggcggagattatcacgcaactgcccggactgaaaaagcggatgttgctttctgcaaccgacgcagaagagatcccggaatttacagggctgaaccgtacagtcagactgaacttcttgccggacgctgccgatgaacaggagtcccgtttgaaattgatgaaagtattttctccggcaaaagataaagttgatactttatacaatctgctttgcacattgggaagcagttcgagcattgttttctgcaatcatcgggatgcggtggatcgtgtgcaaaaactgctggcagataagaaactgtttgccgagcattttcatggcggtatggaacagccggatcgtgagcgggcattatataagttccgtaacggcagttgccacgtgttgatatctaccgacttggctgcccgtggactggatattccggagattgagcacatcatccactatcacttgcccgtgaatgaggaagcctttacgcatcggaacgggcgtacggcacgttgggacgctaccggaacttcttatttgattcttcatgccgaagagaaactccctgcctatatcccggaagatatggaaaccgtcgcactgccggaaaatccaccccgtccgcccaaatctgtttggagtactatatatataggtaagggcaagaaggaaaaactaagcaaaatggacattgccggattcttgtataagaaaggtaatctgactcgtgaagatgtaggagcgatagatgtgaaagagcattatgcttttgtcgctgtccggcgtgcaaaggtcaaacaactcctgaatctgattcaaggcgagaagataaaaggtatgaaaaccattattgaggaggcaaagtaggataggttgacatctacggataacaatatggtgtatatatcctgtataaaccaataaaaagaaaggaaaatctgctttaaaacagtatttttataaggaaagatttgtgcggcggaaataaattcgtaaattcgcaaggtcaaaagacaaaagtaacgaaattgttaaaccaaaaacaaacttcaaatgaaaaagcataatttcaatgcaggaccttccattcttccgcgtgaggtgatagaggatacagcgaaggctattttagatttcaacggctctggtctctctttgatggaaatcagccaccgcgccaaagacttccagcctgtggttgacgaagcagaggcattattcaaggaattacttaatatccccgaaggctattcggtactgttcctgggtggaggtgctagtatggagttctgcatggttccttataacttcctggaaaaaaaggctgcttatctgaacacaggtgtgtgggctaaaaaagcgatgaaagaagctaaaggatttggtgaagttgtagaagttgcttcctctgctgaagctacatatacttatatccccaaagactatacaatcccggcagatgcagattatttccacattactactaacaacaccatttacggtacggaattaaagaaagatcttgattctccggttcctatggttgccgatatgtcttctgacattttctcacgtccgatcgacgtttccaaatatatctgtatttatggtggtgcacagaagaacctggctcctgccggtgtgacattcgtaattgtgaagaatgacgctgtgggaaaagtttcccgctacatcccgacaatgttgaattatcagactcacattgatggcggttctatgttcaatactcctcctgttgtgcctatctacgctgcattgctgactttgcgctggatcaaagcacagggtggtgtgaaagaaatggaacgtcgtgctatcgaaaaagctgatatgttgtatgcagaaattgaccgtaacaaaatgttcgtgggtactgccgctaaggaagaccgttcacgcatgaatatctgtttcgtaatggctcccgaatacaaagacctcgaagccgacttcttgaagtttgctactgaaaaaggtatggtaggtatcaagggacaccgttcggtaggtggtttccgcgcatcttgctataacgctatgccgaaagaaagcgtgcaggcattgatcgattgtatgcaggaatttgagaaacttcattaatatattattttcaccacagattacacggattggcacagatttttaaggttctataatctgtggaaatctgcgtaatctgtggtgagcctttataaatagaatcagaatatgaaagtacttgtagctactgagaaaccgtttgctaaagtggcagtagacggtattcgtaaagaaatagaagcagccggatacgagcttgctttacttgagaaatatacagataaagcccagttgctggatgcagtgaaagatgcgaatgccattattatccgtagtgatatcattgacgcggaagtgcttgatgccgctaaagaactgaagattgtagttcgtgccggtgctggctacgataacgtggatttggccgctgccactgcccacaatgtatgtgtgatgaacactccgggacagaactcgaatgctgttgccgaactggctttgggtatgatggtatatgctgtccgcaacttctacaacggtacttccggtacagaattgatgggtaagaaactgggtattcacgcttatggaaacgtaggccgtaacgtagcccgcattgccaaaggttttggaatggaagtgtatgcttacgatgcattctgcccgaaagaagtaatcgagaaagacggtgtgaaagcgctggattctgcagaagaactctataagacttgccaagtagtgtcattgcatatccctgcaactgccgaaacgaagaattctatcaattatgctctgttgaaggacatgccgaaaggtgcgatgttggtcaatacagcccgtaaggaagttatcaatgaggctgagctgattaaattgatggaggaacgtgccgacttcaaatatatcacagatattatgcctgccgctaatgcggaatttgcagagaagtttgccggacgttatttctctactccgaagaagatgggagcgcagacggccgaagccaatatcaatgccggtattgctgccgctaaacagattgtaggcttcttgaaggacggttgcgaaaaattccgtgtgaataaataatatttcatagaaataaatagtatatttgagccacagattttaaataagtctgtggcttttattttttacatctaaaatactaatatcatggcaataattaaaccttttaagggcattcgtcctccgcaagacctggtagagcaggtcgcttcacgtccttacgacgtattgaactccgaagaggcccgcgtagaagcggaaggtaacgaaaagtctctttatcatatcattaaaccggagattgatttcccggtaggtacagacgagcatgatgagcgtgtgtatgccaaagctgcagaaaatttccaactgttccaggataaaggctggttggtgcaggatgacaaggaaaactattatatttacgcccagaccatgaacgggaaaacccaatacggattggtagtcggcgcatacgttcccgattatatgaatggggtgattaaaaagcatgaacttacccgccgtgacaaagaggaagaccgtatgaagcatgttcgtgtgaataatgccaacatcgagcctgttttcttcgcttatcctgataatgacaagttggacgcaatcatcaagaagtatacggcagaaaaacctgtctacgacttcatcgctccgggtgacggcttcggtcatactttctggattgttgaccgggaggaagacattgccctcattaccgaagaatttgctaaaatgccggctctttatattgccgacggtcatcatcgttctgccgccgccgcattggtcggtgcagaaaaggcgaaacagaatccgaaccatcgtggcgacgaagagtacaactactttatggctgtctgtttccctgccaaccaactgaccattatcgattacaatcgtgtagtgaaagatcttaacgggttgactcccggacaattccttgatgcgttaggcaaaaactttatcgtagaagaaaaagggacagatatctacaagccttccggtttgcataatttctctctttatctggatagcaaatggtacagcttgacagctaaagcaggcacatataatgacaatgatcctatcggtgtgctggacgttactatctcttccaatttgattttagatgaaattttgggaatcaaggatttacgctcggataaacgcatcgactttgtggggggtatccgtggcttgggagagctcaagaagcgtgtggatagcggtgaaatgaaagtggctttggctctctatcccgtatccatgaaacagttgatggacattgccgatactggtaatatcatgccgccgaaaaccacttggtttgaacccaaactccgttcgggacttgtgattcataagttggattaataactgtcatcttctaacaagagctgatatcttataaaattgagcggtcgatctgttgcaatcatacggttaattgcgtcagatcgaccgcttgtttcgatgaaaaagagcggttgtttatagcgaaacgactgctcctttgtgccacatcaaccgtatatttgtggcaaacgtatcatttaatatttccaaacgacagatggtattttccgtgtaaagccgtatctttgcaacatgactgctgaagatacttataaaaccatctccgaaccctctgaaggtatttatacggaaaagcgaagcaagtttatcgctatcgctcttcctgtgcgtagcctcgatgaaataaaggcgcatcttgaaacgtatcagaagaaatactatgatgcgcgccatgtgtgttatgcctatatgctcggagcagcacgcaaggattttcgggccaatgataacggagagccttcgggcactgcaggaaaaccgattctcggacaaatcaattcgaacgagttgacagatatattgatcattgtagtccgttatttcggtggaatcaagttgggcacaagcggattgattgtagcttacaaggctgctgctgccgaagccattgctgccgctacaatcatagaaaaaacggtggacgaggaagtgactgttatgtttgagtatccttttatgaatgatataatgcgtatcgtgaaggaagaagaaccggaaatactcaatcagtcgtatgatatggattgcagtatgacattgcgcattcgtcgttcgatgatggcgaaactgcgtgcccggctggaaaaggtagaaacggctcggattttggatgaagaagaaaatcattgaatggaaaagtgccagttaatatactgaaagtagaataggagaggaagaaaaattgaaccggatgagaaagaaatactacatgatatcgagattacttttggtttttcttgtgtggaacggtgtacaagcctgtgcacaggaagctcaaaagttcgctcccaacaacattcctgttccttggtattcgcagaaaatagcgggatacccttattcgcattgttctctggcttcctcgttaatggtctttgattattttaaagggatgacggctgatacgcaacgcacagctcaggatgcagaacagaaactgattgaatatcagcggaattactttctgaaaaagcgtgctcctttccgtcgtcgcacttcgatagggcaaggaggatactattcttttgaaattgattctttggcacgctattatgaaaacatgataagtgccgaacatttccagcagaaagattatcggatattgaaagattatatcgatcgtggtatacctgtgcttgtgaatgtgagatatacaggtgcggttcgtggtttgcgtcccggtccgagaggacattggatggtacttcgcggtattgacgacaaatatgtgtgggtgaatgatcccggacgttcaccggagatgcggagcaaaggggaaaacatctgttatcctattaagaaacagccgggcaatccttcttattttgatggttgctggacgggacgatttatcgtagtcactcccggagaatggatacggaactccctgtttgcacaagtcggcaagctccctccgttggaagaggtgactcatatccttcctccggttgtgccgaatagaattaagataaaaacagttgtagcaaaataaagaaaaaatatatggcattcgaagcaactaaaaaagaatggtgtgaactttatactttcttccgtttgttggcggacgggagagtagcgttaggcacggcggaagcaaaggcaggagatatattctggcctgttgcaatgattcagagggaagagcacgacgggacacgccggtattatattgaggaagagacgattcgcatagaaggggaaacaggagttaaaactatgtctcgtgaagatttcggtatcgtagcggacttgatactgaaagcggttaaatcctcttcggaaaacgatgtgacctctccggatggagtagaggagtttctggatgaagcggctatcttcgacttggaggcaaaaacggaggatcgcaccgatttctctattgcattctggcattcggaagcgcctttgagaggagttaatgtccgttcgcggttgagtgccatgaatccattgttggatggagggcgtgcggcgaatcttaagctggagcagaccgggattaaatttgctactccgacagtaaacaagatcaatgctttgccggagagccctaatgaagttgccgagcgtatgatgatgatcgaacgtttgggaggagtacttaaatattcggatgtggccgaccgtgtatttcgtagcaatcttttgatgattgatttgcatttcccgcgtgtactgacagagatggttcgtattatgcaccttgacggcatatcgcgtgtgagtgagttgacggagattatcaaacaaatgaatccgctgaagatcaaggatgagctgataaacaagcataagttctatgaatttaaaataaagcaatttctgatggcactggcattgggaatgcgtcctgcaaagatttataccgggctggattcggcagtggaaggtattctgctggtagatggtaatggagatgtgctttgctaccataaatccgagaaacaagtgatggaagatttcttgtttctgaatactcgtttcgaaaaaggatctttggagaaggataaatacggatttttggagagggagaatggggtctattatttcaaactaaacgcaaagatcggattggtcaaacggtaggaaaaagtacaaagtattgagactgtcaaactaataatgatgatatacttatataaaacacttgtcgcccatgaaaacaaatgaagttttagaaaacatcaaggcgcgccgtagcgtgcgtgcttatacggagcaacaagttccggaagaagatttgcggacaatcctggaggctgcaacgtatgctccgagtggaatgcatttggaaacatggcatttcactgctattcagaatgtcagtaaactggcagaactaaatgaacgcataaaaggagcttttgctaaaagtgatgatgtccgtttgcaggaacgtgcccgcaataaggcttattgctgttactatcatgccccgactttggtaatcgtttctaacgaacctactcaatggtgggcgggtatggattgcgcttgtgcaatagagaatatgtttttggctgcacagtctttaggtatcggctcttgttggatcaatcagttaggtacgacttgtgatgatcccggagtacgtgaatttatcactgcattgggagtaccggttagtcataaagtatatggctgtgttgcgttaggatatggcgatccgaagattccaatgaaagagaagaaggtaaaagcggatactgtaactattgttaagtagaaatcatactttcagatttacacttggacttatcttctatgtcacaaagcataagccttggggaaatcaatgtttctccaaggcttcagtttgtttgcccccttggcttatagaaataagcccacgcctcaaagaatgtgagccccgggcttactcaaaggtatcatagcgagtgggtagcaacttacggtctcccaatgtgttgtctacacgtgctacatttgcccagaatttattatcgcgtacactctctatcggataagctgccttctcacgtgtgtaggaatgttcccaacggtcattcacaacctcgtattccggatgcggcgcgttagccaatacattatcgttcttgtccgcttcgccattcttcacttcctgaatctctttccaaatattcagcatgacagctacgaagttatccaattccgccaaactctcgctttccgtaggttcaatcatcaatgtgccgtgaacagggaatgagagggtaggggcatgataaccgtagtccatcaaacgcttggcgatgtcattttcggagataccggtctcttcgtacactttgcggcattccagaatcatctcatgaccaacaaaaccatttgctccacgatagacaatgccgtatgtatctttcagacaggcagccagatagttggcgttcaagatcgctatttttgtagcttgggtgagtccttccgtacccatcatccggatatatccgtatgtaatggggagaatacccgcactaccgaacggagcggacgatacctgattctgtgtattgccgaagataccgtgtccgggcaggaaaggaaccagatgttccgctacacagataggacctactcccggacctccgccaccgtgtggtgaggcgaatgtcttatgaagattcaagtggcagacatccgcgccgatgaatcccggattagtcaatcccacttgcgcgttcatattggctccatccatatatacttgcgctccgcaagcatggataatgtcgcagatctcttttatttccgtttcaaatataccgtgggtggagggataagtgatcatcagcgcagccaattcctccttgttctcttcggctttggtacgtaagtcatccatcttcacatttccgtgctcgtcgcacgcgcaggtgattgttgtaaatcccgcctggatagccgatgcaggattcgttccatgagccgatgcgggtatcaatatcttgttccggtgtccttgacctatactttccagataggcacgaataacgcgaagacccgtatattctcccgcagcccccgaattcggttgtaggctgacaccggcgaagccggtaataatcttcaagtcgtcactcaaattccttataagttcacgatacccttccgcctggtcttccggaactaacggatgcattcccataaactcggaacggcttaaaggcaacatttctgcggctgcattcagcttcatggtgcatgatccgagagagatcatggattgcgccaatgagatatcctttcgatccaagcgtttgatataacgcatcatttccgtttccgtatgatattttctgaacacttcatgggtaaggaaaggagtcgtacgtttcaaggctttgctgatcgtacttctttccgggatgtcgtctaccttctgatagtcctttccggaggcaatggcgaaaatggaaagcagcacattaacggctgcaatgtccgttgtttcgtcaatactgaaacctacgtctccgttctcgtaatacctcagattaacttccttgctaagagcaatcgtgcgaatctgttgtgcggaaacgtgttcgggcaattcaaaacgcagtgtgtcgaaatattgtgcatttacttgcgtgtaaccgaatttcttcagttgcttgtcgagaaacactgtgatactgtggatgcgggaggcaatggtcgaaattccttcctgtccgtggtagactgcatagaagcctgccattgtggccagcagagcctgtgccgtgcatatatttgaggtcgctttttcacgtttgatgtgctgttcgcgagtctgcaatgccatccggtaacagagttttccatatttatctttagaccatccgatgattcgtcccggcatgttccgcttatactcatcccgtgtggcaaagtaggctgcagacggaccgccatagaacatgggtgtacctaaacgttgcgttgttccaaacacgatgtccgctccccattctcccggaggagtcagcagggcaaggctcagaatatcggcagcaacagccactttgcattctgccgtatgcgctttctctgtgaatgcggcatagtcttccacatttccgttggaattgggatattgcaagaggcaggcgaatatttccggtgaaggttcgaactctttatatttgccgacacgcagttcgataccttgaggaacggcacgtgttgtcataacagccaatgtctgcgggaaaatattttcgtccacaaagactacattggcgccggacttttgctgtgcgcgtgagcggagggcatacatcatacttacggcttcggcagcggcagtaccttcgtcgagcaatgagcagttggctagcggcatggcggtgaggtcacatacggcagtctgaaagttcatcagtgcttccagacgtccctgtgatacttccgtctgataaggagtataagaggtgtaccacaccggattctcgaatacattccgctgaatgacggcaggagtaatcgtattataccaacccaatccaatataggtcgtataaagtttgtttttaccagccaatgtggctatgtgttttccaaattcgtattccgtcaacggactagtcaatgcaagcggttctttcagccggatattggcaggaattgttttgtcaataagttcgtctaatgattctacaccaatcttgcgaagcattacggctgtgtcttgttcattgatgccgatgtgacggctagctaacaaatcggttttcataatttgtgggggattatattttatctaaaaaaagggttttctgctttttccattccgatggtcgtaggagcaccgtgtcccggatatacgacggtttcgttagggagtacgaacagacggctgcaaatgtgctctatcagttcgtcgaagttacctcctgtaaggtctgcacgtccgatactgccttgaaacaggacatcaccggaaaacatacagtgctcttctttgcaatagtacaccagactgccgggagaatggccgggcacatggattgcttccagttgggtatgtccgaaggtgataatatctccatcatgcaagtatttgcccaatggcacaggggcttcctgcaactgaaaaccaaacatcctactttgcttcggtgcttcgtcgatccaatattcatccgctttgtttgcttctgccgacagaccgaactctttgagcatgaacgggtttccgaaaatgtgatccaagtgtagatgagtattcagcagatgtttcacgttcagttcatttgatagaatgaatttttttagtacctgcttttcttcttcgtaaaagcagcccggatcgataacaaccgcttcctttgtttcatcccataaaacataacagtttacgggaaacatattaaactcaaatctctttattttcatggttctctatgatttatcttatatatcaagcatatagtttctaaatcggaacatataccacttttttggtttcaaagaactcttccttaaaattgtcacttaggttgtgaatgaccgtcttatgtttgaaaggcattgtttcgtgttccagctcaccgcctttaaggcagatcaatccgtttggcaacgcattctgctgtttggaagaaatgtttttcttgatgatctttatcagatccgccagaggcatgactgcacggctgacaacgaaatcgaacattctcttctcttcttcggcacgggcatggcggaaagtgacatttttcaatccgatggcatttgccacttcagtggctacgcgcactttcttaccgatactgtcaaccagatgaaattgggtttccggaaataatattgctaaaggaatgcccggaaaacctccgcccgtacctaaatccataacactggtgccgggacggaattgaattacttttgcaatgcctaacgaatggagcacatgatgttcatataaattctcgatatccttacgggagataacgttgatttttgagttccagtcgatgtagaggtcatatagagctgcaaattgtttacgctgctcttctgtcagatcaggaaaatatttcagtatgatttccactgctgtttcgttttttatgaagtttaatcttttagttctcccagaatcgggttactgcctaataaatgctccatcatcgggaacggcacggtcactttcacaggacccatagcgtatggagtgatatcgtagacattgtaatagaaagttaccccttctttgcttaaatagaaattttcggttggagtgatgtctccggtagaagcatagcccatgtcttccaatgcttcgtgagtcgtcactttattatcagccatgagctggttccatattaagtcggtcagcgcatctttatattctcctacgaagatgtcatcgagacggagcggacgcatcagtgtgaggtccatattcagataggtagtcatgtaaatgccgtgtgcgcctccggtatattcgttatagtcgatgcgatatacaagcaagtccttttcatatagttgtacatggctttctatacctttataatatgaataccaggcaccgatggaggattcgtcctctttgtctttttcgtcttcggcatacatcggttccagatcacggcgatattcgttgacataattctctgtatattgctttataacctcctccggcttttctccgatatacttgtcgccgaaacaagcggatatgaaataggcattcagactgtctttcagcatatcatccgttgacttgtcggaataggtgaaattgatgatgatgttacatgccggtttggctgtatcattaaagaggtgtaccgtctcatttacccggatactatcgaactgtaacgcaccagtgtttttgttcatcttgtcatgacaagaaaagaaaaagccgcttactgaaagtataatagcaagcaaactgacatattgttttttcatactcgttttttctataaattctacatttgttctatcattcactattgacaaatatagatgaaattcatgaatcggacgaataaaaacagaaaaatattcaggtattcgctctttcggtaagctgcttttcttgtagagtgcgggaattaggcttagtggttgcagactttacttatgtctactgtaaacccattttctaccagcatgaattttcctttcttcttcagaaattcgatgagggtatccacatccatatcttctgccgaacaggcatagaaatgctgttgtttaccgaatttttgaatgattgcttcccgtaatgatgcttccgagtagctattgccttccatcattttttctgcaaagataaggcagagattgcctggaggttgtaacatatgtgacaatgttatattaatattcattgaaaattgaaaataaccatttcgccatgtgtccctattctgaaaggtggtccccatagagacaatccggaagatacatatatatgcgtgtttccccattggcgataaccgtggctttgcatatataatcagtcacccaattgataggccatgtttgtccgtggtgtgtatgcccgctgaattgcaagtcgatgccggcagcttccgtttctttcaggttaaaaggttgatgatccaataatataccggtacacggggcaaaaggatatatcggaatacgttttaatttagctaggaatagtgagtaaaaacaggaaatagcgaacaaagaaacttgaaaaagaaaaaaagaaaggtaatcaaaagactgataagaagtaattgaacaaatacctgtgttagcttgtttctattaataaacaatggttctttcccgactccttttaaggagtcgggaaaggcgtaaactataattatatgggtaacacaataaagaaggcatttcctgtacttaatatgcactgtgcaggatgtgctaataatgtagaaaaaacagtgaaaaaattgccgggagttatcgaggcttccgttaattttgctaccaatacgttgaccgtttcttatgagaaggatcaactgactcccggagaaatccgtgcggctgtgcttgcggcaggttatgacctgattgtggaagaagcccacagggaggaacgccgggaagaggagcagcataagcgctacactcgtttgacgtggaaagtggttggggcttggattttggtagtaccgttgctggtattttccatgatactgatgcatgtaccatactctaatgagattcagatggtacttgctatccctgtcatggtctttttcggaggtggtttctttaccggagcttggaaacaggctaaactgggacggagcaatatggatacactggttgcacttagtacttccattgcttttctgttcagtctgttcaatacgttcttccccgaattttggtatgctcgtggattggaaccgcacgtctattatgaggcttctgcagtgattatcgctttcgttcttaccggaaaattgatggaggagcgtgctaaaggcaatacctcgactgctattcgcaagttgatgggaatgcagcctaaagttgcccgggttctgcgcaatggagcggaagaggagattctgatcgagaacctccagataggtgatatggttgttgtacgcccgggagaacagataccggtggacggtcagctttccgaaggcgattcgtatgttgacgaaagtatgattagtggtgaaccggttccggtagaaaagaagaaaggcgataaagtcttggcaggaacgatcaaccagcgtggctcgttcatcatatatgccacacaggtaggtagtgaaacggtgcttgcccgcatcatttccatggtgcaggaagcacagggcagcaaagctcccgtacaacgtattgtcgaccgcattaccggaattttcgtacctgtcgtattggggattgctatcctgacatttgttttatgggttgccatcggtggcagtgaatatatctcctatggtattctgtcggctgtttctgtccttgtcattgcttgtccgtgtgctttgggacttgctacgcctactgcattgatggtgggaataggcaaagctgccagccagcatattctgattaaagacgcggtagctttggaacaaatgcgtaaagtggatgtcgttgtactggataaaaccgggacattgaccgaaggacaccctactgctaccggatggttatgggcacaatcgcaggaaccttatttcaaagatgtgcttttagctgcggaaatgagatcggaacatccgcttgccggtgctatcgtgtctgctcttcagaacgaggagaaggtaaaacccgctgcattggacagcttcgagagtattacgggaaaaggaatcaaggtctcttatgagggagatacctattgggtaggtagtcataaactcctaaaagatttcagtgcgacagtaaatgatgtgatggctgaaatgctggttcgctatgaatcggatggcaatggtatcatctactttggacgtgaaaatgaattattggctatcattgctgtttctgacccgataaaggctacttctgccgaagcggtaaaagaactgaaacgtcaaggtattgacatctgtatgttgacgggtgacgggcaacggacagcattagctgtttcttcccgtttagggattgaacgttttgtcgctgacgctctgccggacgataaggccgagtttgtgcgtgagcttcaaatgcagggaaagaaagtcgctatggtaggagatggtatcaacgattcgcaggctttggcactggctgacgtgagcattgccatggggaaaggaactgatattgctatggacgtagctatggtaactttgatgacatcggatttattgctgcttcctaaagcttttcagttgtcaaagcagacagtcaaactgattcatcagaatcttttctgggcgtttatttataatctgatcggcattcctattgctgccggtatcttgtttccattgaacggtttgttattgaatccgatgttggcaagtgctgcaatggccttctccagcgtgagtgtagtgctcaattcattgagcttgggaagaaaatgagtaagcgactgtaagaagaaaacaaactgtaagtaaataataaacggtgaatactttgcggattatgcgcaaacttgttcaccgttcgtttttggggattcgttgtttataattttatcctctatcgctcttcacaggaattatctgtttctgaattctagtggtgtcattcctacgtaccgcctgaaatacttgccaaagaatgaggcactggggaaatttagagaataagctatctcttgaatagtcatattagttcctttcagtttcgctttggcgtccatgaccacaatatacgcaatggtatccaacacacttttgcctgtcacttgttttacggttgtacttagatgttgaagcgatattcctagtttatctgcgtagaattgtgcacgacgttcatctttataattctcggtgatggcttgaatcaattcccggcaaatttcctttttacggttcgaactattgttttcacccggaaatttacgatatatcaatcgtatgcttgtcaagatagtctgaagagataattcaaccaattcagaatccatttcaaagttctcattacaactgacacgcgataatagagcaaaatagtctttcagatagctggctacttcttcattgagagggattaccggctgttctatcagttttggatattcattaccgatgtttttcatcagattgattcgttcggcacaataggcggagaaaccggcaaagcagaggcatactttttctgttttctcccgaaattggatgattgttcccggtaacaatgttatcaggtcattaggacgaatttcataatcaagcagattgatggaggctttcatcgaaccttcggtgcagatggcaacaatacatgcctgcaaccgacacgattgcttataaatattgagaatgtcttccgtaacattcgtccatgctaatacttcggtaggcaagtctacctgtgggaagtccattttcatagttgtgtttgttatatttacagtgcaaaagtacatattttctttttatttcttacctttgtttttatgaaaacaacttttatcgattggaatttaataccgtatgccgaagcatggcaacggcaggcggagtggtttgacggtgtagttcgggcaaaagcccagagtgaagtctatgagaacctcattattatgtgtgagcatccgcacgtttatacattggggcgcagtggaaaagaaaataatatgttgctgagtgatgagcagctgaaggcgattggcgctactctttatcatatagatcggggaggggacatcacttatcatggtcccggacagttggtgtgttatccgatattgaatttggatgaatttgcattaggactaaaggaatatgttcatttgttggaagaagcggtgatacgtgtatgtgcatcttatgacattgaagcggggaggttggagaaagctacaggcgtatggttggaaggtgatacccctcgtgcccgtaagatttgtgcgataggagtaaggagcagtcattatgttacaatgcacgggttggcattgaatgtaaatacggatttacggtatttcagttatattcacccttgcgggtttattgataaaggcgtcacttctcttcgtcaggaattgaaacgtgagatacctatggacgaagtgaagcagcgccttgaaaatgaatttagaaaactattccgaatcccagttgccaagtttggtgcataaggcaatccttatcggccagtgcataagagaaatcgacgcgcattggccagaaattaattccacaacccagcgtaccatagttacctattcctttatcattgtctccgaaatgatatcctgcgcggactactccatatttcaggaagttatattcggctcctattcctgcttgcaaatgccggatttcggaaggaagaagatagttgaagtcaagtgctacttgcaaacgattctccacgctgaatggaaggtcgacactacctcccaatcccaatcgtgcaggcaatttctgaccatccagctttttgcccaagttggcggcttggaaaccgatagaccaagaagccattccatccagaagatccgtattccgataataggtggcaccaaagtcaagagcgacactgctcttgctatctgcttcctttgctactttttcttgcagatatctgaatgtcaatgacagtgataagttcttggctacattcctgaagtaggcagcttccaaatcccatatacggggacggtaatccattattttaggatccttgaagtggcggaatcccaaagcaaatccatgaataccttctcttccgatccgatagaaaagagatgcgctgtgcagcgcacagtccttgttgatatcagcgtatgaataactagcgcccattgcttcctgtgagaaagcgattgtagaggcgttatgaaagatagctgtgctaccattatcggtgatagctaatcctgtacctgccatacctgccgattgggcatccggagtaagttccagaaagttggcatttgccatttcttgtgctcccagcaaagcggggaataagcacgaggctagaaggaaatgtttaactcgtttcataattcgttatttttttagtgagacattcggacaacacgtatacctgtccacgatttattattgttaagcatatgattgaggggcttatcactgacaactacttttcccagtgtagaggaagcatgtagcagatgcagtttcccttttatatattgcgctatcccaacgtgagcaatgtccagcccgggaagtttcgttgtgatggcgataatatctccgtccataatccaggataatccattttccggtaattcgcctttcggcagccaatgtacgattttcccggataatgctttctcgtattcggtcattcgggttacgttttccggagaattggctaactttttatatagttttgggtgagcggacatataaaagaggcttaattgaagagtttgtacgctgttctctgccgtcacatccgtaaggaatccttgacggataccattctcgatccaatcggaggtgtaatgcaaacgggaaggatatccgtcgataattccatctctgtagcgtatcttttgcaggttctcagtaaaagaagatccgagagcttgcgccagtgtgtattctacaaaagtgaggcaatccactgcatcggtccggataaccagctcttcttctccatcccggtctagcgtattggccacatatttggttcccaaataagactttccgatttgcagcatcgttcgagagtcctgcggagtaagctccgcaggctgttgttgggcaaaagtcattgcacttataaacgatactatgacggataaaagtcccctcatgtttgcttatttaattttcattgaggctttgataaaatagagaatcagtagggcgtatgctcctaatgccaacacttccgaccaagtattgttcagccatgcttcgttcaccaagttgattccaccgaagcgcattgcggcactgataacccccattaacgcgccaccggcaatgaaaccggaagccagcaatgttcctttttctcctctttccgtattgatagtcgaatctttgctgcggctggtcacaaaccaattgacagctccgcctacaaccaacggcacattcagttccaatggaataaacatacctagtgcgaaagctaatgcaggaatcttgcaaagagtcagaataatcgctaagacagcaccgatgccatataataaccagggtgcgcctacaccactcatcaacggttcgataacagcagccatcgcatttgcctgtggagcagctaatgctccgctcgtaaatccatatgtcttattcaggataatcattacaccgcctacagttgcagccgatacaattgttcccaagaacttccaggtctcctgtttggcaggggtacttcccaaccaataaccgattttcaagtcggtaatgaaacctccggccattgaaagtgcggtacataccacaccgcccatcactaatgctgcaaccatgcctgaagggcctttcagtcctacggctaccattactacagaggccagaatcagtgtcatcaatgtcatacccgatacgggatttgtaccgacaattgcaatcgcattggcggctaccgtagtgaacaggaaagaaatgccggcaactagaagaatcgctaccaatgtgtgtagcagatttccttgcattacatcaaagtagaagaacagtacgatgagtatcaaagtgatgatagaaccgattgcaataatcttcatcgagagatcccgttgtgtacggatgatgtttttctctacattgcctttaccgcccatctctttggcagccagcccaactgcacttttaatgattccccatgaacggatgataccaatgacacctgccatagcaataccgccgataccaatgctcttagcgtaatatttgaatatttcttccggactcatcattcctacagtggatgtaatctccggattccatgcattcagcacactgtctccccaaatagcggacattcccggaatgataatccaccatacagccaatgaaccggcgcagatgatggaagcatattttaatccgactatataacctaatcccaatacggcagctccggtatttaccttgaatatcagtttggctttttccgccagcatttctccggcactgcacacacgggtcgtaaaattctcattccaccagccgaatgtggctacgataaagtcatatagtccaccaatcattcccgctatcagcaagggtttggcttggcttccgcctttttctccggagatcaatacctgtgtggtagctgtcgcttcagggaaagggtatttgccatgcatatcacttacgaaatatttccggaaaggaatcaggaacagaattcccagtacaccacccagcagggaactgatgaatacctgcatgaaagtaactgtcatctctggatattttgcctgaaggatataaagagcaggaagtgtgaagatcgctccggccacaatcactccggaacaagctccgatagactggataataacattttctcctaacgcattttttcttttggcagctccggagactcctacagcaataatggcgataggaatagccgcctcgaatacttggcctacctttaatcccagataggctgcggcggctgagaagaggattgccatagcaataccccatgctaccgaccagaagttaacttccggatagttttttgagggactcatcaacgggttgtatacttcccccggtttcaattctctaaacgcattctcgggcaacccggtgaatttgtcttcttcttgtttcatagttttataatttgctaatgtgtcaatttacgtttccgtcttcaaagtaaacaaaaaaaaaggagaaccgaaagattctcctttatgtaatagcctaaaattttttatttagcgtcttttgctaccatatcgccctcaatatacaatcttaccatctctgttttggcgttggtacgcaaagtgattgatttcttgaaatgtcccggatatttgcctgttccgttataagtcactttgattgtaccttttttgcccggcatgataggttctttcgtatattcgggtacagtacatccgcatgaagctaccgcctggtggattaccaaaggagcgtcaccgatattagtaaaggtaaatgtacaactaactaccggactgttttctgagaacttgccgaagtcgtgagttgttttgtcaaacttaatatctgcattggtttgagcaaatgcaaaacttacccccattactaacaaagtcataaaaaaaagtatctttttcatttttccttctcttttttgattacaagtgccaaaggtaatgctttttctcttaaaatatactttatagagtgcgaaatagtattaaacggattgtatttgctatttggcaagctcgaatccaagcatcattccgtcatagttatcggccagagaactaacggctttgagtgcggtactgttgcttttactaccgataaacgccattaattttagcaatttatccgagttgaataacaattccagtgaattagaactgcaattcactttagcgtgcaggttcagcaatcgcaaatatttcaagtccacttgtttggtggaagcattgtaggagtaagttcctttcaatgttttctttcccactgtgctggtgaaagtactgtctgcattgaacgtgaaactcatttgcccgtccttaatgccaatcttgctcaactgctcgttcaacttgttttccgccattgtcgctgcggctgcacctcctgctttcatcagcagattatccgattcgaactcgacggctgagcttttgtaactccatgttccagtcatgtcgatcgtctcagtgtttcctgtaatggcgttcacaacttttgagatgttgtccttattcaataagtccgcccatgattgtgcctggctgttagttgccgtcagcataaataccaccatcaaggtagcagataaaaaattcttcttcattttcattttatattgagatctttgtttatgctttctatataatcaagtatttctgtccgtccggtgcggttttccgaagaagaaataaagtagggagggagttcttcccattgtttgctcagttcacggagataagcattgatattcatcttcaatcgtccgcttttcagtttatcggctttggtgaaaatgatagaaaaaggaatgccgttttcccccagccattccatgaattcgagatcaatcttttgaggttccaagcgactgtctattaataaaaaaaggtttgtcatctgctcccgttcaagaatataatcctcgattatcgtgcgtatctggtctttccctttctgaccgcgacgggcatagccatatcccggaagatcgacaagataccagtttttattaatcaggaaatggttgataagcatagtttttcccggagtggcagaagtcatagccaatcccttgcgggcggtcaacatattgataagactcgattttcctacattagaacgaccgatgaaagcatattcgggaaaagtgcctgccggacatttcttcacgtctgtgttgctaatcacaaattctgcgcttgttatttccattttctagtcatttgtttctttgacatcaatattagccctgcaaaggtaagtgttccatttaacattagcaattcataaccgaatttatatccggtttcttttccaatccaccaatcggcgaggtaacagagtaggggtgaaaggatagctatcaacggaacccaccgatcgttggtttgtctgcgggtaaaaagtccgaaagcaaacattcctaataagggaccgtaagtataagaggcgatgatatagatcgcgtcaattacacttttattgtttagagtttctacgaggcagatgaagaaagccagtaagactgaaagggataaatgtaccttattccttttacggcgtgccgtttcttcactgtctttttccgtattcagtaaatccacgcatacgctggttgtcatggccgtcagtgcggagtccgagttgctgaaagcggctgcgataataccgattgtaaaaagtatcagaacgggttgtcccagatagccttgcgctgcaaacatgggtaaaatatcatcattcatagcaggtaatgccaattgcatttgtccggctaatgtaatcagtaatattcccagacacaagaatagaaagtttagcggaataaatgagaatccgtaacaatacatattcttctgtgcttcgcgaagattacggcaagacagattcttttgcatcatgtcttgatcgagtccggtcattacaatcacgatgaagataccgctaaagaactgtttaaagaaattttgccgggatacccaatcatccatgacaaaaattctgctgtgttcattgtgctgaatggtctggataatgccgttaaaatccagtcctaattcttgaattgtaaaatagataataaaaatcagtgctgctatcagacagaaagtctgcaaagtgtctgtccatacaatcgtttttattccgcttttgtgggtatacacccatactaaggcaaccgatccgacagcgattatccaaaagggaatatgcatctcctgaaatacataagtgtggagaatgagacaaaccagatagagtttggctgccgttcccaacatacgcgacaataaaaagaaaaacgagccggtacgataggcgcgcgttccgatgcgtgtgccgagatagccgtatatacttgtcaagttgagtttatagtataagggaagcaatatatgcgctaccaccatatatccgaagaaaaagccgaataccgtctgcatatatgtcatatccatgccacgcaccatgccgggaacagaaacgaaggtcactccggaaatagaggcgccgatcataccaaaagaaaccacataccaaggagatttattctctcccttgaagaacgctgcattcgatccgcctttatatccggtgatacgggctattaataataataccgcaaagtagcatattatagtgacaagtatcatcatatcgactgcaaaggtagtgttttttgtaggtattataacaataatctgtatctttgcgccaaaatatcgatagaaccgtaattattatctatgaatcaacaatatccttccatattactcgaaaaggcggtcggtgaattttccaagttgccgggtataggacgtaaaacggccatgaggcttgttttgcatctgcttcgtcaggatacggccaccgtagaggctttcggaaattccatcatgacattgaaacgagaggtgaaatactgtaaggtatgtcataacatatctgatactgaaatttgccagatctgcgccaatccacaacgggatgcttccactatttgcgtagtagagaatatccgcgacgtgatggcggtagaagcaacccagcaatatcgggggctctatcatgttttaggaggggtcatttctccaatggacggagtgggaccgagcgaccttcagattgaaagtctggtgcggcgggtatccgaaggaggaattaaggaggtaattctggctttgagcacaacgatggaaggagatactaccaatttctatatctatcgtaaattggatagactaggggttaaactgagtgtgattgcgcgtggcatatccgttggagatgaattggaatatgccgatgaagtaactttgggacgtagtattgtgaaccggactcttttcaccggaactgtataatttaatatttagaaatttagaacgaacatggaagaacagataaaacgtgctgtcaggaatttgaatataggttatgttttcttttgggtatttccggcttttctgcttggagcaggggagttcgatctcttgcccgtaggaaatctggtagataatgtacaggctacttattattttgagactatcggcattctgttgacggcactttgcgtacctctttctttgaagctattcagcttggtgctcaaaaagaaaatagacaatatgactatcacgctagcactgaaacgttatgtgcaatggagcattgtccgattgggaatacttgaagtcgccattgtagccaacatcctatgttactatttgacattaagcagcaccggcaatctttgtatgctcattggcttgacggcttctcttttctgtctgcccagtgagaaaagattgcgtaacgaacttcacatcacaaaagactaaagcgcatgaaacaatcttatctgacaaacgagcgcatctatcttcgtgcagtagagccggaagatatggatattatgtacgagatggagaatgatccttctatgtgggatatcagcaatttcacagtcccttattcccgttatgtactgcgccaatatatagaaggctcacaatgtgatgtctttgcagacaagcaattacgcttgatgattgtgagtaaatccgatcatgacatactaggcactattgatattactgattttgttccgctccattcgcgtggagaggtcggtattgccgtgcataaaaactatcgtcggcaaggctatgcaaccgatgcgctgaagctactttgcgaatatgctttcggttttctgtccttgaagcagctctatgcacacgtggcagtggacaacgaggtctgtctgaaactatttgcatcgtgtggctttacccaatgcggactcttaaagaactggttacaggtagagggatgctataaagatgccgtacttcttcaatgtctgaatccccgaaaataactgaattcctataagataggtaatgaaagcctaaatgtcagttcagcgtaggcacttgtggaaaacgtgaccacgtttcatacttgctgcctagcttttccaaagcctctttccacatatctttggtgtcgtttctcatcagatatgagttctcttctttggataccagccatgtgttttcctttatctcactatgtaactgattgctttcccaaccggaatatcccaagaaaaagcggatacattcattcactttattcccttgcaatatatatttctttatttcttcaaaatcaccgtttaggaaaagccccttactgacagggatagagccgggaattttctctagagtatggaggtagaataaagtatcagtcgctacaggaccacccttgtagagaggtatttcatccaaatacttaaattccgtgataacatcgttgagaagcagtggcaattgtttattgatgaccaatcccatagttccttcctccgtatgatcgaccagtagaattacggatctgccaaacgttgcatcgcgtaaaaaaggttcggatatcaaaatctttcctcttgacggcaatacattattcgattgaatcttaaatatgtccaggttgatattcatgcccctaaattaataaaaaaaacggaataattatcgttatttccgttttttttgatttagcagggtgcttttatggatgtcttaccgcaaacgtcaggctaccggatgattttctgcaaataatctcattctttcatcaagttgtgcatattgatgatctttaataaaagaggtacacgcgcgcaaaccttcctgatgacttccggtagtcactaatgagatagcgcttacaccgtagtacatcagctccttggcaagctcaccgctagtcattcccggatatccgattgtgaaataaaatccgtctgcaataggatcacccaagtcattgtcatataccagatggaacccgtgatgcaggaagatatctttcaacttcttcgctctttcaccatatattttcacttcattgaggaaattgtattgtccttcattagcagctttcagcatggcagccatagcgaactgtgcagaatgactcgttccggaagaaagtgcatagagcacccgatgaatgaagacggtcccgaaagttccgccgccgtaccgttttgtcagtcccggataacttctgtgatataacttgtcggaaatacaacttacaccgatacgttgtccggcatagctgaacgctttcgaaccggaaatcaacaagacataattatccgtataatgagctaccgacggctggtaaggagcctgatacggcttgctcaaatcctgacggaagtccattgcgaaataggccagatcttccagtacaatcacatcatattgtgtagccagttcaccgataatcctcaactcttcatctttcaagcagatccaactaggattattggggtttgagtagatgattgcagatatattgcctttcttcaaataactctccaatttttctttcaatttgtcgcctcggtaatcgtatacatcgaatgtctcgtatttctgccccatcacaaccaactgctgcttctgcaccggaaaaccgggatcgataaacagaatcgtatctttcttttcatcgcattggctgcaagtgaggaaagaagcgaatgtgccttgcatagaaccggtaacaggtacacagccttccgggcttaaatccacattaataaatgccttgataaagttagaagcctcctttttcaattcgggcagtccgttaatgtccggatataggctggctatctctttttgtagcgcttcaacctctgctttcaccccaacggcagaaggaggaagtcccggaacacccatttccatcttaataaactcaacccctgatgcggcttccgcttttgaagcaatagctttcacttcacgaatggttgctttagaaaaatcgacaatttgaaactcatttatggtttcatcaatcagatgtcgttcaattggtgtatttttcattctattttctattttatgtaatagctgcaaatgtacacgataattcttaataaacccactttttcagaaaaaagatatgaaagctattgtaggtttcaaaaaaatatctacctttgcatccgcaatcaagaggattgtgattgtcaaatgatattttggtacgttagttcagttggttagaatacatgcctgtcacgcatggggtcacgggttcgagtcccgtacgcaccgcttctcaaccaagaaaaaataaaaaatccctctgattctcaatgaatcagagggattttttattactctcttctattattctttatttccgttgtacccccattttacataaatggctccccaagcgaatccggctccaaatgctgtgaaaatcaggttatctccctttttgaacttattctcaaagttccagaggcagagcggaagtgtaccggcacttgtgttgccataccgttcgatgttcaccatgactttctccggcggtattcccaaccgttgtgtgactgccgcgataatgcgttgattagcttgatggggaatcacccaatcgatctcctccttgctaagatgattcctttcgatcagagcctcgcaagcatcggacatattggctactgcatatttgaacacggtgcgtccttcctgataaatataatgcatcttgttatccaacgtatagtaggagggaggacataccgaaccgcctgcttttatatgcaagaaaggcaaccctttaccatccgttctcaataccgcgtccataatccccacattctccgttgttgcctccagcatgacagcaccaccaccgtcaccgaagataggacaagtagcacgatcagtataatctatgatggacgacatcttctcggctcctattacgattaccttcttatagtttcccgaacggataaaattagcccccgtctccaatgcatataagaatccgctgcacacagcctgcatatcgaaggcaaaagcatttttcaatcccaacctttcgcatacgattgaggcggttgaagggaaacgatagtcgggtgtggtggtagcgacgataaccagatcgatgtcgtccggattggtttttgtgcgttgtatcaactgtttggccgctttacgcgctatgtatgaagtaccgagtccctcttcttttaagatacgcctttccttaatgccgatacgtcccataatccattcgtcggtggtatccaccatcttggaaatttcatcattggtcaggatgtaatcgggtacatatcccccgactcctgtaattactgcgtttatactctccattgttttaaattgattttgctgttttttagaatgaggtaattaatcccaaatgataaatgcgggcgcaaatatatagaaaagagaataaaatccaatgactgtctatgtcacagccacctttttaaataataaaaaggaatattatgccaaatttttccaaaagcgttaatcgttttcttgtgtttgcaggaagatgtgcgtggacggtttttagtaataagtaaaaagttttttgaattctttattgagtctgtatttttttatttatctttgcggcaaaattatccggtagctctttgggcgacggggtgatctttataaataatgaaacttacttctgaacgcgtaacgactaaggttttacctgcatatgtgacaggtaacggcgtagccttgtctaaaaagcgttggttggttgctcaagttcgtatttatcacgagaaaaagacaagcgagcggctaacaaaaatgggcatagaaaactatgttccggttcaaagaaagacccatctgtggagtgatcgtcgcaagcagatcgatcacatcgtaattccgatgaaaatatttgtacgtgttgatgcacaagaacagaaagacgttcttatgctatcggccgtcagccgttatatggtgcttcatggtgagagcgctccggctgttatacccgatacccaaatggagaaattcaaattcatgttagactattcggaggaagcagtcaatatgagtaatactccattgagtccgggtgagaaagtacgtgtcataaaaggcccgttgagaggactggaaggtgagctggttactttgaacgggaagacaaaaattgccgtccggttggatatgctcggatgtgccagtgtcgatatgcctgtgggatatatcgaacgggtggtgtagtaatttattaattggggtatatatgaagaacttatgtgagcgctctgccgcataagtttgtaacaatcaatgtaattttattggggaaatcatgattattgcttatctagcaggcatattcttactatccatactgcttgccactgtaattattccgcgtattttattcatctcctacaagaaacgtctttttgatgttcctgatagccggaaagtccataaaactccgatccctcgtctgggcggtctttcttttcttcctgtcatcctgatagccttatgttctgtcacggggatccgttattataccaatcatccggtcgatatgctatgggcttccgatctgttcatacaatatttattcttaatagtaggcctcacccttttgtacctggtaggagttgccgacgaccttgtcggagtaggctaccgctataagtttgtcatacagattctggcagctcttcttttcccgttgtccggtttgtggattaacgatttgggcggattgctggggctgcatgagataccggcttatataggaatgccgttgacagtctttcttactgtatacatcacgaatgccatcaatctgattgacggtatcgacggtctggcttccggtctgagctgcattgcactgggactgcttattatcgtttgtgcgctcgtcggccaatggactcatgcttttctggcggcagcgacattgggagtcgtcattaccttctattattataatgtattcagcgtttccggcaggaaactattcatgggcgatgcaggaagtctgacgttaggttatatactcagctttctagtcctgcatttctggcagaagacacagctttgggacccgtttacgatgaacctgaatatggtgaccgtctccacactgctgattcccctgctcgatgtcgtgcgtgtgttctattcccgtgtcagtgagggacgcaatccctttacaccggacaagaaccacatccaccatcgcctgttgcgtacaggcatgaaagtacgtaccgtgatgataaccctgctcatgctgtcactgtttttcgttgtctccaactttatattatcattctatatcaataccactttcatgcttttactggatttggctttctggctgactactcatttcatcatccgttatttcatcatgaaacatgaaactgccacaggcaggaaatggtataagacatatcggaatttcttttggtaatcaaacacatacttactttatacatacatcaacaaataatgaaaaagataaacttcggacttttattatttatcctactgacaggaacttcctgcatctcttccaagaagatgatctacctgcaaggagttgattcattggcaaatcccgctcaagtgatacagcaggactatgaattacgtatcaaaccggacgaccagctctatatcatggtgagcagtaaggaaccggaactgcttgctccctttgccaatacgcagatactaggctcatccacatccggtggaggcacgaatatccaggaaaccaccggagtccaggtagacaagaacggaaagatagacgtacctgtcttgggtgagatacaggcagcgggactgacccgcctccaactggcgggcgaaatcaaaaaacgtctggaagaaggacaatacatcaaagaccccgctgtgagtgtccgcatcaaaggactgaaaatatcggtaatgggcgaggtaagcaatcccggcgtgcatgagatggctggcgaccgcatcacactgctcgaagcgcttagcatggcaggcgacctgacacccacggccaaacgtaccaatatcctcgtacttcgtgaagaagaagggaaaagacacacctatacggtcgatcttacttccggtcgggatgtacttgagtctccctgttattatcttcagcagaacgatgtggtatatgtagaacccaacaaatccatcaacgtgaaaggaagctccgcattgtcatatttgggagcgggagcaagtatcatttccgtattagcctccattgtatccctgattgtcgtactaagcaagtaaaaagaaaatatggaatatattcaggaaaacgagagaacacccaagaaagacgaaggaggaatcaatcttcgtgatgtcgtcgaactgatcatagccaactggtactggtttgtcctgtccgttttagtatgcgtgggatcagcttatttttatgtactgaccattcagccggtctatcagcgccaggcagtgatgctggtgaaagataaagaaaaatccgcttcggacatgtccgccatgctcgaagtgagcggaggcataacaggaaccagtgtcgataatgaaatctatatcctgcgttcccaccagttgcttcgtgaagtagtcaatcgccttcatctggatgtgggttatgccaaagacggcatactgcgtgatgctcctctttatgcggaatcaccggtagaagttcattttatcgacccttacaatcagccagtgtcattcaatattactcccctcaacacgacaaagttccgtatatccgactggaaagtggcgggagaaaagggccgaatgcaggagcaggacttaacgtacaatgacaccatccggacagaagcgggaagaatcgtcgtgcagttgcgcccggaaaacttgtccgcctatctttcccaaccgatatcagtcagccgtatcagtccggagatagcaacaaacatttaccagtccaagatagcgacctcattggcaggcgaacgcaccacgttggtacagataacctgttccgataccaatatatcccgtgccgacgctattctggccgctttggtgaaagtatacagcgagacgatcatagaagataaaaaccgcattgcggccaacacagctaaattcattgacgaacgtatctctattatcagccgtgaactaagtgacgtagaagaagacctcaccgatttcaagcaacgcaatcagattgtagatatgagtgccaatgccacgcaatacttggctgagagcagtaaaataaaagaagaaagcgcacaattggagacagagttgtctattgcgcggtccatcaagacctacctggcggatgttacccgcaaagaccagctgattccgaacgtgacaggagtgggagatgtcagtatgcagagccagattaccgcctataacgaacttatgttgcaacgcaaccgcctgaaagaaagttcgggcgagaagaatcccgtagttcaggcagcggataagaatctggaaggaatgcgtgcgacaatttcaggctctatggataattatatgaaaaccttgcgtcttcgtctggataaggcaaaagcagtggagaaccgcctggcgtcaagcattcaggcagtacccaagcaggaaaagatggcattgagcattatgcgccagcaatctattaaagagaccctctataccttcctgctcaacaaacgtgaagagaacgccttgcaactggccattaccgaagccaatatccgggtggttgaagaacctttcggctcctattcaccggtatctcccgcacgttcttccatactggctgctgcctttatagtagggctgctgataccattgggagtacaggtcatcatcctgctgttgaacacatccgtccgcggacgtaaggatattgaagaatacactaccattccgattgtcggtgagattccggcacgcaaagattcggaaggagacgatgcgattgtagtaagtgacagcagaaacgaccgtatctccgaagctttccgtatgctccgtgtcgatctgaacttcatagcgaaagaagcccgtgtcctgatgttcacctctaccttgtccggcgaaggaaaatcatttgtctcccgcaatctggcggttgctttagccatttccggaaagaaagtcatattactcgacacagacctgcgcaaacacactcaaagtaaattggcgggagtaaacaggaaagaagggttaagtacctatctatccggtctgaattcaaatccggacactctgataaccgtcggagctttccatccccaagtcgataccatctttgcgggaatcattcctcccaatccggcagaactgctgatgaatgaacgttttgatcagctgatcgacgaactgaagaaacggtatgattacatcattttggataatgtccccgctttggtggtggcagatgcggccatcgtcagccgtgtgacagatctcacaatctatgtcattcgtgacggagtgttagaccgccgttacttgcccgaactggaacgcttgcatcaggacggcaaattcaagaatatgtgtatcgtgttgaatgacagtcaggtagaaaagaagaagtacggctacggttacggaaaaggttatggatatggctacggttatggctacggctatggacatataagtggatattattcagaggaaaataaagataaaaagtagataaagttaggaaatccaagaaagaattagttcttttgtaggacgaaacgatagctatataaaatgaggttaatacagtttacatatagaggagacgattggaggttagctttgcctgttaatttgcaggaagtcaatctgttggttggcaaaaatgcggtaggcaaatctaagactgttcgtgctttggggaatgtgttgctttatttgatgcagttgtccgaacgaatttctgtatcagatatattccggtgtaagcttctttttgaagacaaggacggttttattagctatgagtttcagctgagcaagtcaaatgttgtttacgagtcactgacagcaaatggtgaaacccggttgtaccggaatgagagtgagactcatttatgtggtgaacccattaatcctccttccaacaaactcacgcttcatgttcgtcgtgatgtattgcaatatccattcattgaaaagataatgctatgggcggaacatgcatgtggattgtgtttcaatgagatagaaataggtggcgacaatgatatgcctttttatatattaggtcagagacagactctttttgaaatggtaaagtccctgcccgaagaatcaattcagcaagttgtcagtcaggcacatggtcttggttatcctattctgcaaatcgaactgttggagcatggaagtaatctgaaaatggtattgttccacgaagaaaatgtgaagagtccgatttttggttcattgatgtccaaagggatgtatcgtgctctctatcttcttatctatgcgcaatatatgtctgttcgtgaatatccttctttattgttgattgatgatttgtgtgaaggactcgattatgaacgttcaacaaagttgggtaaatacctttttgatttctgtgcaaagcatgatatacagttgatagctacatctaatgatacatttctgatggatgtagtcgatttgaaatattggaatatacttcagcgtgaaggaagtgaagtcacttccattgatatcataaagaatccggaactgttcaacgattttgcatttacaggtctgagcaattttgatttcttttcttccgattatattgctcggaagatgaaagggcataatgaataaacgtaaagttgccgtatttgtagaaggacaggcagaatatgtctttgtccgtgattttttgtgcagatggtacgattatgattctactcttttgggaatagaatgtttttctcttcgttccgatctttataattcagaaccatacccatttggtgatcgtaaaagcgtcaattactatcagatagtaaatgtaggcaatgacaggagtgtactcagcaaaatgttgaaagaagctcctcgtttgcaaaatgccggttttcatcaaatcataggattaagtgatatgtacagcgatctttatcatgtacaaacaaaggaaagatgcattgatgttgctgtgaatcagaaattgatagatgaatgtcaaaatagccttaatgcgtcttcacagagggatttattaagttatcattttgctataatggaggttgaagcatggatcttagggatgtatcagtttcttcaacagattgattcaagtctgactccgcaatttatcatgtcaagattacaaattgatattactgccgatccggaaatatccttttatcatccggctaaagtcctggatgagatatatcgtctggcagggagacaatacggtaaacaccttaacgaaatagcttccataacttcgcagttcagtaaagatgattatgcccgtttgcttgcatccggtcattgcaaatcatttaacgaatttataaaagaccttgttgctgaatagcgaaccaactatcaattatatttttatttatgtcacaagaatctcgcgtaaggaaatccttgcttaacgcgcgtgtcaatcttattttttatttcctgactctagcattatctttcttttctcgaaagatattccttgatacgttaggggcggattttgtcgggttgacaggtacattgcaaaatctgttaggtttcctcaatctggcagaattgggtattggcagtgctattggttacgtactttataagccgttattcgatcacgacgaaacaaagagcaatgagattatttctgtatttggctacttataccgttggataggaaaaattatattgatagccggatgtatattggcttgttttcttccgcttatattccccaatacagagtttgatttaggacttattttctttgcttatttttcttttctcgcttcttctttaattggttattttgctaattataaacagactttgttgggagctgaccagaagaattatgtagttactgcttattttcagacagccactattgtaaaaacaatcattcaaatggctttagcctattatacaggaaactactatttgtgggtgattgttgaactctcttttggtattatctattcctttatattgaattggaaaataaatcaggtatatccgtggttgagatcagaagtcagtcagggaagaattctttttaagaagtatccggaggtgatgaaatacacgaagcaattgtttgtacacaggattagtgcttttgtgcaatttcaagtttctccttttttaatatatttattcgtatcattacaaactgtagctttctatggtaactatactttaattattgataagttaaaccaactattaaataatttatttggaagtgtgggggcaggtgttggaaatttaattgcagaaggaaactctcaaaaaataatacaaatcttttgggaattaatggcaatacgtttttttattgtgggaatagctgtttttagtttttatcacttgatgtctccatttatatcattgtggttgggagaagaatatgtactttctaaatcaatattgattcttttaataataaatttctttatcggtctatcaagaggaactgatccttttttatatggttatggattatttaacgatacttgggctccagtggcagaatctgtgatttacattaccatagctttagttggcggataccattggggattgataggggtgatttggggtagcactataagtctttttattataattggtatgtggaaaccttactttttatttgtaaaagggtttaaacagaatgtgtatttgtattggatagagtggagcaaatatgtggcgatacttgtagtaacgagcattctatgtacggtatttattcaaaagaatattgatattcaggctacttcttggcttatttttattcgagattcactacttattacattcctattttcggttgtatatgccatatttatgtattttctgtcaaaaagttttcgtggtattttaaagcgtttattgtttaaataaaattctttatagaatgattcctaaaattatacactattgttggtttagtggagataaaaaatctcgttttataaaaaagtgcataaaaagttggaaaaggtgtatgccagactatcaaataaaatgttgggatgccgatagctttgactttgatagtgtaccatttgttaaacaagcatataatgagaagaaatgggcttttgttgctgactatgtgagactgtatgcgttatatacggaaggagggatatatttggatagtgatgtaaggacatttaaatcatttgattcttttctttataatgacttttttatagggacagaaccattaccgaacaattgtgttgaattggaatctgcaataatgggagctattaaaggacatccttatgtaaaagagtgccttgactattatagacaaattaacttcagaaaagaaaatggagaaatttttgctacttgtccaatcataatgacatcgattgcggagaaatatggttatgtggcaaaagatgaaaatcagctattggaggctaatatacaagtttactctcgtaaatattttggtcacttatggggcacaaatcctggacaattgtatgcaatacattattttaacgcctcatggttagagagtaaacatggctggttgtatcgctattgtaaacaaaatgatttcatgagattctattttatatcgacaaaatttttgaaaaaattcaagaaataaaagtagattttatctacaattttaacaacacggaaaaagtttatttggtcttatgaaaaaagagaggattcatgttgctaatatgaaagcaaatatttatactcatataaaatcttaagagataatttgtgcaatactaaataaactgtctttctttaaaaaataaaatatggaaaatacacttttaagtattattgtcccagtctataatgtagagttatatataagaaaatgtttggatagtattttaaatcaaacattccgagagtatgaattaattttggttgatgatggctctactgaccaaagtggagcaatatgtgatgaatatgctttaaaagataatagaattgttgttatccataaagaaaatgaaggccaaagtacagcacgtaattgtggcataaaagcgtcttctgggaaatacattacatttatagactctgatgatgagtatggaacaaagtctacaattgaagaaaatattaaatttatgctagcggacgatactgttgatattttgcaatatccaacattatggtctggagaaggaagagagagtctactatctcaaaagaaacaaatttatatttgtgatggagaatcctttagaggagtctttcgaaatataataacgactacagcgtgggataaaatttataagagaaatctattagataaggtccaattccctgtaggtcgtatatttgaagatactttttttattatggatattttgaaatatgctcacaatgttataattaccaattgtggatattataaatataaaatacgttctggttcaactatgaaatctagtttttctccccaaaaatatgttgattatttcgatgttatatttaaaatgttaaataaagcacgtgagtttaaagaaggagaagatttctatatgagaacaactattcaattaattaatcgttatatgctagcgagaaagcagcatggaaaagatgttttttgtgtatatgagaaacaaataaatgcatatattccaagaattgttagtataatgaaatgtggctttcaatatagattaatggatgttattaagttacttgtaataaaaagtatagggctcaatagttactgtaaactttatgaagtgattaagtggtgatttgtaatatcaattatgtggtcaaatgagactaatttaaatatatgaaaatccttcaagtagcttctggtaatttcttttctacatatggtggtggacaggtttatgtaaaaaatattgttgatgaaatgatacgtcaacggtgctccttaattatattttcttttttagatgatagtaatggaattgaaaagagaaattacagaggtattgatttatacgaaataaagaatgttgaaaggagcgaactacaacaattgatacaagctatccaacctgatatcattcatgctcatagtcagaaagctttaatgtgtaccattggacaggccttgcatatacctgttattgtaacgtcccatcatggtggaatagtttgtcctgcgggaacattgttaaacttcaaggacgaaatttgtaatgtttcagtatctcatacaaactgcctgccatgtgtattacagaatattcggagtgggaagtattggtatccattcatgaaacagttatcaatggagcaatatatttctttaggggagaaattgcaggctaagccttttatcccttttattacccctattggacagtctgcattatatataaactgtaaacaaaaagaatggcaaagcattgtagaaggatgtacccgcatgatagctccttgtcatgcaattaaagaagcgatgatacgcaatgggttggataaaaaaaagattatagtaattccacacggtattcctctaccttccaatgtctcttctctctcttctatcggaaatgagtgtgttaagtttttctatgtaggacgtatttgttatgtaaaaggtattcatgtcttactgcaagcttttaacagcttgcagcaagataacgtggaattacatttgataggtggtgcgggtaataagggagaacgcagatatatggctcaattacagagaaaatataaaaaagattcccgtattatttggcatggaaaagttgaaccagaacaagtgtttgatgagataaaaaatctgcatgttttagtattaccctctatttgtttagaaatctttgggttaaatatctccgaatcattagctatgggaaaacctgtgttagcaacaagatgcggaggtgcggaaatgcaaattgaagatggagtgaacggatggttaatagagccaaacaatgtagaagccttatatactaaaatggaagagataattagcaataagaaaagaaattatttgatgagaagtaagcaagtggtatctatagaaaaacattgcaataccttattggaactatatttgaatgaaatatcaaatggatggaagtctcattacttttaattgtatgttagtatgaattattatttgagaagaatataatgaatagaactttgataccttttacaatctatacgattggaaaatatgtctataaaatacagtctatctctataaatcggaagatcatagaatcaggaagaaaatttatacaaatattatattctggatattatgcatcacaattaaagagcgtgggattacaatttagattaggctatccagtaaagtttatatatggtgcacagtatatttgtataggaaatttctttactagctttccacaattacgtttagaagcaattaagactgaaactaaaacaccgcatataattattggtgacaatgtatctatggggtataactgtcaaataaattgtatagataaaatagtgattggaaataatgtacttttcggaagtaatatatttattacagatcattttcacggtgcatccaatatagatgaaacatatataagtcccaataaaagagccttatattctaaaggtcctgtagttatcgacgacaatgtttggattgggcaaaatgtatcagtaatgcctaatgttgtgattggtgagggatgtataataggggctaattctgtagtaactcatgatatacctgcattttcgattgctgctggatgcccggcgaagattataaaaagaatgaaataatcatatttgttaattatgaatgaaaaatgtaagttgagtattattgttgtttcttataatacgaaagagacgacagataattgtctttattctatctataattcaatatggaaagactcctttgaggttattgtgatagataatgattctcatgatggctccgttgaaatgataaagaacaaatatcctcatgtaaatttgattgttaatgaagataataagttatttgccatagctaataatcaaggtgccagtttggctcgtggaaaatatttacttttacttaatagcgacactttggtagagaaagacaaccttcagaaaatggtttcctactttgaaactgtacctgatgatgtgatctgtattggaccaaaaatcttaaattatgatggaacaatacaatcatcgggatatcccaatcccggattacgagagcgtttctgtatgtgtttcaaattgcacaaacttttaccagtttctattgttgaattaatttttcgtgtgaaaggttttccgcataacagtaatattgttcgtgaagtaggatgggtatcaggatcttgcatgatgatacgtgcgaaagaatataaaatgataggcggattaaatgagaatattgagttttatggtgaagaaccggaatttggttatcgcagcaagaaacatcattatcgaactatttattaccctaatgctgaaatcattcatctgggaggacagtcttctagtaaaaaagttgatgaagaaattcgtttgcgtagatatgctctgttacaacgagaaacggtaggatattccaaatctatttggatgtctagaattgttctttgtgcagcttatttgaaaaagatagttttacccaataaagcctccttgttgcaagctattgagtgggagaagaaggttattgattatttgagaaaggtaaaagatgaagaaacttctcattgatgtaaattccatagttccttattatgtgtcaggcaaggtaaatggcatagggcgtactacattggaattgctacaagcattggcagatatagataatttaccttttgagatagaattgtattcacaaaacatgaaaggcattggtggacgtaatacaggattacctttcagttattcacatctatatttgccgtatcgggagaaatggaataagatactatcaaaatttccaatacgtgaatggtttaccggatatgatataatgcacatacctcataactttgaatatgtacatcgtccggaaaaatgtatagtaacgattcatgatgctatgtttttttcttatccggaagattttttaggtcatggctatgctcgtaaacattatcctttgcttgcacaaaaaagtaaggctgtcataacatgcagtgaaaactccaaaaaagaaatcgtggaatatatgcatgtagatgaaaacaaggtttatgtttgtccttggggagttgatcatcaattgttcagacctcgaacgaatatatctaataaatatacacaaaatagacctttctttttatctgtatcatgtgacattggacgtaaaaatacaatttcagtgttgagggcttatgaaatcttcttaaaacatcatcctgaacatgatttgattctagtatggagaaacccgcctatggatattgtcgaaagattcagtaaagatgaaatgaagaataaaattcattttatttcagacattgaaaataaagaattgggtgaactatattcaagtgctagcgcaacattttttccttctaagtatgaaggatttggattaccgatattagaatctatggcgtcaggaactccagttattacttgccgtaacagttccttatctgaagtgggaggagaagcagctatctatgtttctccggaagatatacaatctatgagtgaatggatggagcgatttgaaaacaaatctatagatattttgtcattaaaagaattaagcacggcacaagcttccaattttacatgggagatatgtgcaaataaaacattggaggtatataaacaatgtttggaattgtaaaagatgtaattagactactacgaataggaataattcgtatgatggcttcagtgaggtccgatatatttacaattttatcaggttctaaagttttgattgtggctcctcatcctgatgatgaaataatcggttgtgccggattgatgcagtctttgttaaaagcgggtaaagaagttcatatagtaatacttacaggcggtgaaggctcccataagggatgttgttccaaatcaaattcagaactaatagaagctcgtagagatttggctgctaaagcaaacaaacaaataggaattactaaagaaaacctctattttttgcattatcaagatggaaacatccattatgagtatcaggaaacagaaaaattggctgatttaataaaaggtgttcaacctaattcaatttttgttcctcataagggagagggatggaatgatcatttacaagttagaaatatgatacaaaagctaataaagaataacagtgatattcgactttatgaatactgtgtgtggttttggtattataacacttggaatatagattggaagaatgcttttaccctttctatgacaaaagcggagcatttgctaaagaaccaagctattgatacatatatattacctaaagctccttgtggaaatccgtggagtggtgtattaccgaaagtttttattaaagctgcccgttggaataaagaactatatttcaggataagatgagaatgaagaagacatctaatagtgccataattataggtgattccaccaataatacattaagtattgtccgtagtttgggtgaggctaatatcgaacagactttaatccttaaatgtgatgaagatgtttgttttgtagctgaaagcaagtaccttaaaaacagttctgtatatcgtataactgtgattgaagattgcatgccgatcttagaacaattgaagaaagatacgggcaaaaaaagatatttgatttgtagctttgacgaagcggcggttttcattgatgaaaatgagcctatactagcttctttcttttatacgccagcacgagggaaacagattggggatttatttaataaagataagcaatgtaagcttgcgagtgaatgcggattagttgttcctaaatcacaaaattttcatagaacagaacatcttgatgatttggtattggattatcccattttgctgaaacctttaaatagtaccaaaggtgagaaaagtgacattcatatttgcaacaataaaatagagatggagaaagctctgttggcggagagtcattgttctgattttattttgcaagagtttatagaaaaagaatatgaaatagattgtattggagtaagaactgaaagagaaatgtatttggcaggaggaataagaaaaattagacattatcctgaattaataggagcgggtgcgtatggcttgttccaacctattaaagaatatgatattaatatttcaggcgtagagaaattcttagaacgagctaattattatggtccttttagtgtggaattccttcataaaggaaataaaaactatttcctggaaataaatttcaggaatgaaggtctagcttatgctgcaacagcttctggagccaaccttcatgctttgtatgtaaatccggatatggagattgatagaaaacaaatccgtaaggtgtatatgatgaattattccattgattttctttatgttaagaatggagcgttatcactgtcgacgtggatccgtgatttattgaggacacgttgtttcataaatattaatttaaaagatctgaatcctacaatttgttattatagaaacaaaataagaacgaaaattcaggcttttagggaacgtcggtagataggtccgattactgatacagggataatacctttgacttcagttatgttagtgattggtaaacaaagttccggtaaaagtacatttctgaagattttatgtttttgtagatggatggaaaaactgattatgtggtctgatgaagaagctatatctcaatatacacataatctgaaattcctgaaaagcatgaagcagtttcatcggtttaatgactcttatttttcatctgcaagttctatccgttatgaaggcgatacaatcacaatcacgatggagaatattctcagtgatgtgaagattctgcggaaaccggagtttgaaacagtcaggtataataaatgatggtggaaacgatttggtccgactgattgatgagaattaagatgataccggcttattatgcttccagtggcgtgcagtctgccatgcctaaaggtaggggagacagtatgttggttatgactacacacagcccttatatacttccactttgaatgttcttatagccgaggcgtatgcgatggacacgaagccaaagtctgacaaattgcggaatatagtaaataaagaatgtctatttcctttatctgcttattctgcctattatattcaggaagatggcaagtttgcggatattatagacaaggatattacgatgattagcagaaatgaattggacggggtttccgattgggtggatgacaagatagctcggataaatgcagtgctttatggtacaaaaagataaaatataacttcatacaataatcttattttttaggatagcgttcctgcatttaattattcatcttctgtgaaaattttaataactataccgtgccttcttaccggaggcacggagatacaaacattgaatcttgtacgtgcattagtacaggggggacatcaagttatagtaacctgttactttgagtatactccggcaatggtacaaagttatcaggataatggtagcaaagtaatttgtttgagtccaaacggtatgcgaataggcggatggaaaggtatattattcttatttaaggggctgaaaaaagtaataagaaatgaacggccggatattgcccatgtacaatatatggctccgggagctatccccatttttcttttacggttgttgggcatgaagaatattattgccaccacacatacggcagcagatatttatcccaatcttcgtttgatacactttgttcaaaagtactgtgtgcgtgtgttcacctgtatcactatgcgtgcggaaaagtcttttttcggaagtgcagaactctataactcaagcacaatattgaaaaaacgaaatcatttcaccatttacaatgccttgccaccttatattcatattcgcgaggaacagaaacctttttctgacggacaaatcacattaggagtagttagccgtttggaacggattaaagggatggatttggttgtccctgcatttgccaaattgaaaaaacaatatacggacattcggctattagtggtgggggacggttcgcaaaggagtataatgcaagagcaggcgatagaactgggagtgaatgatagtgttgaatggatgggacgacaggaacagtcttgtttgcaatcattgtatgaccggattgatattctcttaatgccatcacgtagtgagggatttggactgactgctattgaaggtatggctcgcggttgcgtggtagtggcttcagataccggaggattgccggaagttgtaaaagatggagaaacaggacttttgcatcaggtagaagatgtcgaagatatgactgccaaaatacaatccttattggagagcaggatgaggattatccagctttcccgaaattcagtttcgtatgtatcacaattcagttttgcgaaatatgccacggcattttgtaacttatacgaacgtataaaacatataaattgatttatccggatgtatctattgaattatctttatttcattattatcacaggctttggcattaagtttctgtttcagcgtgcaggaaaagtgcgccaccctttaaataaggagcagatgcttagtttcgacggtccggagttgttttggacgttaactttctctaccggcttgttagcgctttctgctccgggagcactcgacttgatggctatccggcttttagtacttgaaagcctttgtttgataggtttgtttgtggtgaaacggaaaccggtatggagtgcggtgagtattttctatttgctttatattgcttggttactgataggactttcttattctcctgctcctgcctatggcttccgggttattctgaaatatttgtatccattatgtattatgctgtttgcttcggctgtggtacgtgacggagaagtgtttctaaaagcgggattgtgtgctcgatgggtagcggtagtttgcctcattttttcttttgtaccgggaataagtattcttgtacccggagtgttctggtatggtactgctcgtgccattcatttcattcctatttgcatattttcattggcactttacttttacggaggaaaaaataagaaagatttatgttgggctgttttgttcgctattccttgctttgtatgggtgtttcgtactagtatcatggggactacattggcagtaatgacttttttcttttttcgttatcgcttaaagtcattacctgttataatgggaatctgtttgttgtttattgtttctatatttactattcccagtctgaaacaaaaaatgtttaaagatgataatgtcagcattgaacaattgagagaagggaagattagtaaagataatattaatagtaatgcccgatttgcaatgtgggaacatttgatgactcgtttctatgagcagaaagagttgttggggtcgggcagtggctgtacacaaaattatatgtatacccattttatattcgggggattaaaagtaccacataatgattatgtacaaatattgtgtgataatggaattattggacttatattgtatttgttggctggtatcattgcaatatttcatagtttcttgatttacaatagaaatcataggagtattgtaaagattgtggctataacggcagggagtactatggcagggatgctattgacgttatattcggataatgtcgtaaattattcgatggcgactctctccatgccttttggattttatggaatgatgttaggattaaatgaagcgaaatagatgatatcagtagtaatacctctttataataaagaaaaacaaatagcaaatacactacattctgtattgcggcagactttccaaaattttgaaattgtagtagtagatgatggtagtacagataacagtgtacaggaagtagagaaagtgaacgacattcgtattcgaattgtccatcaaaagaatgcgggagtatctgctgcacgcaataaaggcattgaagaagctaaatatgatttaatcgctttccttgatgcggacgataaatggaaagcggaatatttggaaacccaatactatttatttcagaaatattcgcaatgcagcgtgtatgcttgcggatatgagttttcagatagtaatggaaatgtttcaggtactattattcgtaagcttccgtttcaggagaaagacggagttttgaccaattattttgaagtggcaagttgttcacatcctccaatatggacttctgcggtaatggtcaagaaggatgccatacaggctgttggaggtttcccggttggcattaaatctggagaagatttattaacatgggctagattagctgtattatacaagattgcttattcaaaacacagtttagccgttttcatatttgatcctttaatatttactcaggatcaaaaagaacgtagaccagaacaaaaagataaagttgccatagaactgaaaaagatttatctatgccataaaaatataaaaggattaaaatcctatatctctctttggcataaaatgagaacacacatatttatagataagcattgccgaataaaggcattgaaagaatgtctaaagtcaatttcttggtcaataaataaaaaaaatatagcgtttcttcttttattattattaccgttctctttttttaaatacataatgaataagttttcatgaaagtagttattattcatactgattttcgtatttactggcctgctcgtttggctgcgctacattcgtatttggagaaatacaatatagaattgcatattgtggaaatagcaggtgctggaagtccttatgcttttgccaaacaggaaaaagaagttagttctaaattgaactggcacattttgtttccaaatgggaaaatggaggaattaaaaagtcgtgttataaagaaacaagttgatcgaatattggatattttattgcctgatgtcgttatagcaggtgctattgctttcccttccggcgcattgtctgtggcatggactagcagacataaatgtaaaatgatttgttttgatgattcacgtcttgaagatactgttcgtagttcatgggttaataaaataaaacagtgtatctatcatggtgtggacgcaatgttatatcctgcacctgcatgggataatacaggttatgcatgggagtttaaaaaagaacaattattctatggtatagatgttgtcgacaatactttttggaagcccaagacatggaataaaaatacttgtgacaaaaaatattttttgtcagttggaagattgcttgaacgcaaaaacttcattactttgttgaaagcatacaaacaatataaaatacagtgtaatgattcagcttggaatcttattattgtgggggatggtccaaaacgagagtctttagttgaatacattcgattaaataagttggagaggtctgttatattgcttccatttttgcaacaaaaagatttaatacctttttatcagaatgcatctgctttagttttgactagtatacaggaaacatggggacttgtcataaatgaggcaatggcaagtgggcttcctattatagttagtgataaatgtggtgctgcatccacgcttgtagaaaaaggtaggaatggatatactttttccccgttaagcgaatctgatttggcggattgtttgttgaatttttacaagttgtctgatgaacggagaaatgagatgagaaaagcttctcttgaattgatcgctgattggggaatagaacgtttttgttctggagtatatggtgcaatacagtatgttgttcaccatcctaaaaaaaagttatcgtggatagactcagtgatgatagctttatggaaaggacgttacagacctatgtagcataagaatctcatcagaataatgaaaattcttctcgtccacaacaactacggtaaatatagcggtgaagaggctgtagttgataaaatggcttcaatgttccgtgagcatggacatgaagtgtgtttctatcgcttaaccacagaaaggagtcgtgagagcttatccggaaagataaaaggtttcctttgtggcatttattctccatcaggggtgaagggcttgcgggagatattggaacgggaaaagccggatgttgtgaatgtacacaatctctaccctttcattagccctgccgctttatttgaatgtaagaaggcgaaagtaccggtagtaatgacagttcacaatttccgtttaatttgtccgacggggctatttatgcgtaatggcaaaccttgtgaagtttgtctacaaaagagaaatgagtggagctgtatccgatataactgtgagcattcctatctcaaatctgtgggatatacgttacgaaatgtatacgctcgctggacgggggcatataaagataatgtaaatacatttgcttgtattacggagtttcagagagagaaactgatggaagccggatttgataaaaacaaaatagttgtgattcccaattcgatagatgcatcatcggggtatgaagcaatattggaaagctacatagcatatatcggcaggttaagttacgaaaagggatatgacttgttggtggaaacagctcgcaaacatccggaaattcaattctgtttagcaggggcaaagagagaagatactaatatcgctttccctgagaacgtgcgattaatggggtatttgaaagggaaggagttggaatcttttataaagaacgcccgtctggtggtgataccgagtagatgttatgagggttttcctatggctattttggaggcggcacagtttggcaaaccttgtgtcggtcccgatcatggtggatttactgaaattataggcaaaggagagaatgctatcggacgattgtttgaaccgaataatctgaatgacttggaaaaacaagtcctgactttgtggaatcaacctgtattaacagaggaacttggacgtaaagcctatgaaaagctccggaaagaatactcatcggaagtcgtttataggaaatgggatgaattgtttactaaaatacttaataatcaatgaataatgaaaatgaaaacacaaacctctgtaactttgaggggggggacaaaaagcgtgccaaaaagcaaaagcgtagttcgaatattgaactgttgagaatagtgtcaatgtttttggtactgatgattcactatataccatctagagaaataccgacattggaattgttgaatgaaaacaagtttgaaacattgtttaatttagaattacggagtttgagttttgtttgtgtaaattgctttgtgcttatctccggcttctttggtattcgatggaaaatgcagtcgttactcaatcttttgtttcaaatcttattttggataatcatttcttattttttagttgctttatatacacgtacatttaatctatttgaattcttgcgtttaatatttagtgattttacaggtcgttggtttgtacaatgttatttagggttgtatttgatagcccctattgtgaatctatttatcgaaaagtcttctgctaaaatattaggttggtttattatagtgttctatgcttatagtactatttggggatatgtaggcaaagctgaggattttaatgaaggtatgagcgtaataagtcttttaggattgtattttgtgggggcttatttaaggcgtgaactcattcggttaaaaaaaatatctgcactgagatggctgtctatatacctgttaatagggtttataatggtaggaatttctgccttgtcgttaaaagtgggaattgaatctagtccatacggatatcttaatccactcattgttttagaatcagtggctctctttttgttttttgctaatttgaatataggatatgtaaaatgtattaattacatagctatttctgctttttctgtctatctttttcatatgggcggagtcatttatccctattatcaggaagggtgtagatatattgaatcaagttataattattcttttttatgggctttactatatatggtagttgtatttactgttgctgtaatgatagataaaattagaattgttctattcgactatttgaaatttattatgaatttattttcaactaaaaaggtgagatgtaggttgattaatcaattaaaagagtaggataaatcagatataatttgttcctttgtacaaagaaacctgttagaatgaaaaaagtaaaagaaccggtgtcaatttattattctcgtcctcagctgataaagctgaaagagagtttgatggcttctatcgaacgagaggaggatatagaggttttgaggaattgtgctgagcttttacatttggagttagattctgacgaccctttatcaatggatgcgtctgaatgggaaagtttacgtgatactccattgccttattgcttttcgaacgaagaattagaaaaggagattgaagagtctgagaaaagtgggtgggcgaatgatgatgatgtaaatacatttatagaccagtggaagaatttaagataaaatggtctaagaaggcttttctgcaatatcagacaattgcaaaatggtattatgtgaatgtgtgtcccaaagcggcttcttcctttgttaatggcatatttgagacagtgataaagatttcaaagaatcctactattggaatgcccgatgtgcgttacagtaaaaaaagatctgttcaatatcgtagctttttatctcatcctaaatatagaattatataccgtgtaacgaaaacctctattcgcattgttgctatacaatgcaatttaatggaggcgtagtaaccattatttactttttctattattgctatttcaaatattcaaagtgaatcatctttggatctaatttttttatggaacaatacttcaacatcaattacgaatttgacaaacaaagcgttttctcttccatcgaccgccaactgcaaacttcctctcccggctacatctgtgtggcggacggggttatactgaacacggccaacagggagccggactatctggaagtggtgaacggcagtatgttctctatttgcgacagcagttatgtgccgctttatctgcgctggctctatggaattgagcggaagcagtattgcggaagtgaaatctttatggacatcatccggcagaaaaagtaccggatgtttttcatggggacttcacagggcactttgcaagggcttaactatcatctttcacagattgacgaacgtatcaatgggatgactttttatgaacttccgttttgtaatgtagaagacttcgattatcccggaattgcacggatgatagatgaagatggtgcggacatcatctgggtggctctgggtgctccgaaacaggagatattcatgagccgtctgaagccttatctgaaaaggggagtgatgattgccgtcggagccgcctttaagttttatagcgggacggatgtgaagcgcgctccccattggatggttaagatgcatcttgaatttgcctatcgcatctttagcgaacccaagaaacagttgaaacgctgcggatggattgtatatacacttcccggattgttgtatcgggaatggagaaaaaagaaacttgctaccaatttcattcgataatcacccaacgccctgatttattactcccttcacgccttatataacctgcgtcacgaagttccttgattttcttttcaatagcacggcgtgtcacagaaagagtgtcagctatttcgtcaagtgttatgcttgagttatgacgaatcaactcaataatttgtcccgaacttatcccgaatttaacccgaactttatcccgaacttcagagtattcgctctggggcaggggacttccttgatgattttttaaagcatccagaatctcttgcagcataaagtcaatgaaaggtccggaattggctgctgctgtgctggcttgaatagcgttataataagcctcttggttggcatacaccatattttccacagggagatgttcaaatagagggtgtaatttccctaatatgagtgattgccataatctgccggttcttccattaccatcactaaatggatgtataaactcaaattcataatggaatacacaactgcgaatgagcaaatgatcttttgcctctttaagccattcgaacaaattgattatcaattccggaactctattggcaggaggcgccatatggaccaatcctttctcagagaatacaccaacgccaccacgtcggaatctgcctgcatcatcggtaagcgccatcatcatcgtaccatgtgcttttaataaatcgtctacactgaatggattcaagctgctatataactcatacgtctttatcgcattctttacctcttgaatctggcgtagtggcgctataacagtcttgccttctatgatatccttcacttcatcttcggataaagtatttccttctatggccaacgaactgtgaattgttcttatccgattagcttttcgcaatttcatcgcatcactctgttccaaacggatggcataacgttctatctgtccggatatttccgcaatcagattaatggcatgagcagatatggtgaaaggaggtgtatacatatatcagttgaatgattcggttcataatagatggaacaaaaatacgaaaaaatatcagtttatacaaaataaaaaggcggttcatccatccgaaccgcctttattatccacatacctcttatcttaagaggaaccgctattcctacaaatcttcatactctttcctcgcatcgaagcatgggcacgctttatgaacattcgcgctcaactgataatgccctacaatcttagcttcgggatacagtcctttcaactcacccaatacccggcggagcgtttctttttgcgaagcggttctggtatccgtcggcttacccaattcatccagtccaccttcatagcaaatcgataaactgtgcaggttgaatccgagcgcgtgtgcgccaatctcactcattgggcgggtgtgatgcagcgcgccatccttcgtcacataaaaatgatacccgatacatttgaagccacgtttcagatggcattggagcaactgctcctccgtgaagggaatattcgcacgggtagcactgcaatgcacaacgatatacagaatgctgcgcggcacatattcctccttcaacgagaactctttcaactctttcattcgatccggccgtttagatatgtcccatacaagacgttacacccagagcagatacgattgaagtagctactgtaataatgatctgtaaaatttgtttccaaatagactttttcataattcttgaatttttaaattaataccaccaaacatcctagatcttattctgccggatccggagcttctccattattgccgtcgtccgggtttccactgccaccgtttccgccatccggcttcccgtccggatcggggacaaccgcttcatcgctttccccttttttgactagcgtatacttcatcgccttacacatatccagcagcatattgcccggacggaagcggacacgcgaggtcttgatacaggtggccgccttaaatttctctgccgtttccgttgcattgccggtggcaatcgttacacggaaactgcccatatcgcccagaaggacaatattacccaacgccaactgattcttcatctccagcaaaaactccgtaatgcaacccttcaactcaccgatagaataagaggaacgctccgacacacggctgattacctcgtccgtatccactctgcggttgctgcgtgccatcgcataaaacttagctgcttcttgtggtttcaacggattcttacgctctaccactacatacttctgtgccataaatctaatttttttaattgataattttaatagttctgtaatcgattacactgcaaagataccacatccgaaagggggagtggacgacaccgaacgacactgaacgatggttattgtttttgactgaacatttgcttcattgcataaaaaagagtacctttatggcattaaccaaagaataactcaatagaaaatggaagaagaaaaatttcgtgtgagatgttacgataagaatgagttggcgaagatgtatttccccaagctgagcgatcatgtgtctgtggcgaaactccgccgctggatgcgcaactgtacccctctgatggaggagctcgcaacgggagattttcatcccaaactgaaaatgttcagcgcacgggaagtacgcctgatcacgcgctatctgggcgagccggatggatatgtatcggcacagggacatccggacatcaattgactgcattttcagaataaaacgactgcttcttccggacaagacaacggtacttcccgaacgatacgaccgctcttttcacttgaaaggagcggtcgtatcgttagataaatacggttgatttcatgcaggcaaccgctcgatcagacacaaagatacggtcgtttgcgcatagtcgatttcccggctggccgacacttaacgggtggtatttttcttcatccattccaagtcgggctcgtaatccaccagcttcgtcatactcttgtcgtggcggaagtaaatctcaccggtaggtccgttacgatgtttggcaatatcgattactcccaatccttcagtcgggtaaccgcttctacggtctgtctcacgaccggacaggctgggacgggaaagcatcagtacgaggtcggcgtcctgttcgatagccccgctctcacgaaggtcgctcagagcgggacggccgtcgggatgtccctccacgttacggttcaactggctgagaagtatcacggggatatgcaactctttagctatcattttcgctttccggctcgcttgagccacctcctgttcgcggttacggttgtgctggtcgctcttcatgtcgcagagttgcagatagtcgatgaaaagacaatcgcaatctcccttactttgtagcagtttggcggacgtgcggacataatccatgctcaccgacggattatcgtcgatgtaaatagggaggcgcgacagctccgtcgatgcctcatggacctcccggagttcggacggagtaagcgccccgctcagcaagtgggcgggagaaacctccttcgtagccgccagcagccaacggtctcccaagcgttccccttgcatttcgagactgtacacggcaatgtgataaccggcggaagcggcggcacgtgccagatgcagcgcaaaagccgtctttcccaccgacggacgggcggcgatgattatcaggtcgcccggttgccagccgcacgtcaggcggttcagctcgttgaatcccgtcggcaagccggtaactccgttcttgttcgaggcgacacgtgtctctatcagttccacagtatcctccatcaattgcagcatggaacggagatgttcggacattccgcattccttttccaattggtcgagaagggtatgtgcatccgccagcgtgtcggctatgtccgttgtctcgtcggcagcctgtgccagcagtttatggaatcccaagatcgcttcacggcggatatacttctgttgcaggatacgggcgtgatactccagatgcgcgctggacactacgcgtgtggtaatgcttaccagtgcataaggacctccgatgaagtcgagtttgccccttcgtgtgagttcttcctttacggtcatgaggtctatgacctgccctgcacggtacatactctgcagggcggcatagatttcacggttcttctcaatgtagaacacttccgggcgcaatattccggcaaccaatgtgatcgccttgctctctataaggcaggcgccgagtacgatttcctcgagctcggtgtcctgcggatttacaatgtcatccatgaatcgtttcaataatcatattcatccagaaacgctttgtccgacagataagtgcttgcctgcatacagtatttcgtatccgtcagatgatcgtaatactcgtcaatctgccgtatgctcatactgcgttcgcggggagaaagtttcttccattcccgtctggcacggccgatattgaccctttgtttctgggttacctcgtgatatttctcccagaaaacctcgaaggtgacaccacccgtttcttcacgtgccgcctcacggcgtctctgtccgatcagcaagtcatagtcggggatacggatgtgcgtgatgtacggattgaccactctttcaatgatcccttcttcgtacatcctatcgaagaaacggcgtgtgcggctgagtttccatccgaacactttcgcccagtgggtgagggagatcaccgattctcccctccggcattcgaaggtctgaccgttgacgcgacacgtcacagtgctgtaattgacatgggttaataccaagatgaacgcttcgaaactgcccgttgcgtttttagtcatcttcatttgttcctcgaataagactttagggaagaggatgtagccctttttcagcatttctgctattgatttgttcataactgaatattattaattcggctcaaaggtataccgtttatttgaaccgggcaattgtgcggttcattccggttcaaagtgatgttttcggctcacgcccggaggggctttatgccatacgcgggaggggttttcggtgccatatttagcggcacccctcgcggcaccccttgaaaatctctcaaacgccttgtaggaaggggaatccggacgcacgttttttgcgttccggcaccccatccggcaactaatatatataataaataaagaatgtattaaaatacattatatctttttcctcattttggggatggcaagatagggattttctttaatcatttcatataccagcgcaggcgttccccaacatctcacgatggcggcaatctgttggggagtaagtgtctgggtgtgcggggtaaatcccgcttccgtcagttgttgcggcaatgccgggtgttctgttatcgtccggcgaaaagctcgcaccgctgaactgttgtactgaaagttcggaaaataagcgattgccacttcggacaacgcatggcagccacaaagcagccagtcataggatttaattttcatgttcctttattcatttaattacggcgcaaaagtatgctttctccgaatgatgggataaactgttatttttattgtcggtaatttcaatatgaaattagttggaaaatatttaaataaaaatctaattatttaaacaatcttttctatatttgcatccgatattagattttatatggcatttctgttctcttatagacagtagtgcccagtttaaataaaaataaaggaattaggatgtcgaaaagaacaaaagaagcacaaaaacatttacaacagaaaagggaacaatatcatcgtcaggaagagaagatagaggaaatgaaatgtacaatgcaacatacggaagaggaaatcaagcaattggaatatgtgctggaagtaatggaaagcgcggaaaaaggccgcaagcggagagtgatcactcatgataagataaaggagtactttgcttctttcagccgtttcttcgactttctgcagcaccgcttgaatctgttcgtgcattatgaactggtgtgcgagatcatctttgcgcgctaccggttccgaagcaggtcgcgcactcccggaagggaatatctcagtttcgctaccgtactgacttactttaaaaatgaaaggagtatggtgagctgatagtacgaataaaatagaaatctaaagataaaagcatgaaaaacaaatgttttaggaacagaaatgactaaattgatattttttccttatttttgtatgtccatttttgaatgatatgatacagataatacaattaaaaggaaaagacaaacgtttatatcggctgctggcacctctggttatggatcctgacgtgatacgtgccaacaacaattatccgttcaaaacgggtgaagactacgtctggtatatcgcggtcgatggaaaagaagtgaagggatttatcccggtggaacagaaaagcaagaaaaaggctgtaataaacaattactatgtaggagctgaaaatacggagcgggaagagatcttatccgatctgctgcctgctataataaaagatttcggtcctgagagctggctgcttcattccatcacacttgtacaagacaaagaaatattcgaaaagttcgattttacatccatggataagaaatggacacgttacgttaaaatgtatagataggaggcttatggggaaaaaagttgcaggcgctaaaaatgtatatgagctggcacaagaacgattgaaagtaatatttagcgagtttgataatatatatgtatcattttccggaggtaaggatagtggggtattgctgaatatgtgtattgattatatccggaaaaataatttgaaaatacgtttgggggtcttccacatggattacgagatccagtataagatgaccatcgactatgtagaccggatattggaggccaataaggatattctggatgtttaccgagtatgcattcctttccgggtgtcgacctgcacatctatgtatcagtctttctggcgtccgtgggaggacagcaagaagaatatatgggtacgctccatgcccaagaaagcgatgacaaaggaggatttccctttttataatacgtcaatgtgggattacgagttccagatgcgttttgcgcaatggctgcataataagaaggacgcggtgcgcacctgctgcctgatcggaatccgtacccaagagagtttcaaccgctggagatgcatctacatgagccgcaaattccagatgtatcataagtataaatggacttcaaaagtaggtaacgatatttacaacgcgtatcctatttatgactggaagacgacggatgtatggacggccaacggaaagttccaatgggattacaatacgctgtatgatctgtattatcgggcaggtgtcaatctggagcgccagcgcgtggcgagtcctttcatcaatgaggcacaggagagcctgcaactctaccgggtgctcgatcccaacacttggggcaagatggtcgggcgggtgaacggagtcaacttcaccggtatgtatggcggtacccacgctatgggatggcagtcggtgaaacttcctgaaggatacacatggcgggagtttatgtatttccttctgtccacgttgccggagcgggcacggaagaattatctccggaaactgtcggtaagtgtgaatttctggcggacgaaaggaggctgcctgagcgactcgaccatccagaaactgattgacgccaaagtgccgattgtcgtgatggacaacagcaactataaaacgttgaagaaacccgtgcgcatggaatatcaggatgacatcgacatcccggaattcaaggagatacctacctacaagcggatgtgcatctgcatcctgaagaacgaccatgcctgcaaatacatgggattctcgcctacaaaggaggaaatgagcaaaagaagtcaaataatggaacaatatagaatcatagtatcatgagtgtagataaaagccctgtttatgaggtaaaggcggtgcctgtggaaaaagtgtatgccaacgattataacccgaatgtggtggctccgcctgaaatgaagttgctcgaactgtctatctgggaggatggatttacgatgccctgcgtatgttattatgataaggaggccgaccgctatatcctggtggacggttaccaccgctatacggtactgaagacatcgaaacggatttacaaacgcgagaacgggctgcttccgattgtcgtgatagacaaggacctgtccaaccgtatgagctcgaccatccgccacaaccgtgcgagaggtatgcacaacatcgagttgatgtgcaacattgttgccgaacttgacaaggcggggatgtcggatcagtggattatgaagaatatcggtatggaccgagacgaattgttgcgtttgaaacaaatttccgggcttgccgacctgtttgccaatcatgagttcagtattccggacgaagttgccccgacggaaacggagcgtaaagtgttgtaaccaggcaattagatatgtatgctattgttaatttgtcttttttagaaaataacctttctgaaaattgtatatattaatcaaatcggttacatttgtaaccataaacaaaacagagacagcatctatattagtaaacaatagaatacataaaatgaaaagaattctggtaagtggaggggccggctttattggttctcatctttgtacgcggctaataaacaacggtcacgaagtgatatgcctggataatttttttacggggtcgaaagacaacatcgctcatctgatgggcaatcaccattttgaagtagtgcggcatgatgtcacttacccatattctgcagaggtggatgaaatatacaatttggcttgtcccgcgtctcccattcattatcagcatgaccctatacaaacggccaagacgtcggtgatgggggctatcaatatgctgggattggcgatgagactggatgcaaaggtgttgcaggcttctacgagcgaggtgtacggtgacccgattgtgcatccgcagccggagtattattgggggaacgtaaatcctgtggggtaccgttcctgctacgatgaggggaaacgctgtgcggagacattgtttatggattatcatcgacagaatgatgtacgtgtgaagattatccgcatattcaatacctatggtccgcgtatgctgccgaacgatgggagggtagtttcaaacttcgttctgcaggcattgaacaatgaagacatcacgatatatggagatggaaagcagacgcgcagtttccaatatatcgatgatctgatagagggaatgataaggatgatggagacggaggacgattttaccggtcctgtgaatctcggcaatccgaatgagttctcgatacaggagttggcgaaaaagataatcgccatgacgggttcttcttcgaagatagtgttcaagtcattgccgaacgatgatcccaagcaacgacagccggatataacgctggcaaggaaaaaactcggttgggagcctaccatcgaactggaagatgggctgagccgcatgattgagtattttaagggatctaaaacgaataaataaggtgataattatgaatgtaaaaattaatccttccgaatataaagtcctcattgtggacgatatcatttcaaatgtactattattgaaggtgctattgaacaatgagaaatttcagattgtaaccgccgacaacggtacggaggctttggcgcaggtgaagaaagaaaaaccggatcttgtgctgttggatgtcatgatgccggacatcagtggatttgacgtggcgaagcagatgaaagctgatcccgaaatgtctgatattcctatcattttcctgactgcgctgaatagcacggcggatatagtgaagggattccaggtgggaggtaatgactttatttccaagccgttcaataaggaggaactgatcatccgtgtgacgcaccagatttcgctggttgccgccaaacggattattgtggcgcagacggaggagttgcgtaagacgatcatggggcgtgacaaactgtattctgtgattgcgcacgacttgcgttcgccgatgggttctatcaagatggtgttgaatatgctgattctgaatctgcccagcgagacaatcggtgaggagatgtatgagttgctgacaatggcgaaccagaccactgaggatgtgttctcactgctcgataatttgctgaaatggacgaaaagccagatcggtaagttgaaggtggtttatcaggagctcaatatggtggaagtcgtagagggtgtaagtgagatctttacgatggtggccggtctgaagaacattaaaattgtgcaggatatgcctgtggtccccgtagttgtccgtgcggatatagatatgcttaagacggtgatccgtaacctgataagtaatgcaatcaagtttagcaatgagggctcggaagtgctggtgtcactgactgaggaggacggtatggctatcgtcagcgtgaaggatagtggctgcggcatcgatgaggagaaccaaaagaaactgctgcatacggatacgcatttcagtaccttcggcactaacaacgaggaaggttcgggactgggattgctactgtgccaggatttcatcgtcaagaatggaggaaaactctggtttacgtcgaagaagggagagggatctacattcagtttctcggtgccgctattgaagaagtaagtgttataattatacagactaaaaataataaatagggcataatttgcatagatatgtaaatcatgccctgttttattggtatattctactttcgtctatcgcttacagattaccttgaagtcgcaatacgcacatttcttcatgtcttctgtctgcgtgaaaagttctttctcgtcaaatatttcttctaataaagcttgcagacgttcacggaactcgtcttcaaagaaagcgaagttgttcaccggtatcttcggtttgcggggttctcccatttcaatgacaggcgaatagctctctgaggcggcacgatgaatataaagcaaggcgggagctaccattaaaggctgtttccggctcatgatggcggcatacaggaacgtctggaagatataattgggacgcgtttccgaaggagtgaacaattgctcgatattggcaggaattttcgggcttcctcctgttttatagtctacgatacgtaatgtaccttctttggcgtccatgcggtcgattgttccaccgagacggagcgttaaagggcctaaggcagtctgtatggttatcttctccgatacctttttctccatagcgaccatctcgaaaggagtgtattggaggtcgttacgaagcaactgtttcaagtaagaaacgattactttggaattgatgagctgcacaccgttgtattcgggcttctcttccagtgcgactttgaacagttcctgcttgaaggcttggtctacataaccttgcagctttatttcgtcacgcagcagacgttccaagtcctctctctgaatcatttttccgttggctgtcaggtcagtgtaagccagttgggcggagaggtggaagatcgttccgaacagggcggaatcgatttccgcacttacttcatccggtgttttcagtccggcaacgtatcggtaatagaacctcagccgacaatcaagataagtgttgagggcagaaggagaaaggatgacggattcgggctgggcagtatcgtaggcacggtaaagccgtctcagtatttccggagttttttctatttgtatctccaacgtgttttgcggagattgtccggcttccagatactcgcgggtaatctcgtgcggaccttccaccagcagttgcagcatgaaacgggactcttcgccacgattcagtccgtccgaagaggtgttgtagagcagcgtgatattctctgcccgttgaatcagacggtagaagtagtaagcgtatactgcgtttttatgttcgatggtcgtcataccgaaggctttgcggaggttgtaggggatgaaggaggactctccaccggctttcggaagttgcccctcgttgagcgacaacatgataagattgcggaaatcgaggttacgtgtctccagcactcccatgatttgcagtccgatagccggttctccgtggaaggggatattggaagcggtcagcactttagtaataagacgtttcagggtatcggtacgcacgcttaattctccgctttctatcaggctgtataatctatttattttcaggtgactctggaagatggattcccgatatagctggttgaaaatatcgtcatattccccttctttgcgatagaggatggatatgcttttgattaatcggagcaggtagtcgcataactccctgatattgctttgcggagtgaaaaggatagtcagaaaatcatcttttttcagttccgacgggagcggatagaaacggttggtctttgtcagctcgcgttccaggcgggtggcatgatccgatagttgccgggtgtaggggtgttttaatatttttgatacggcttcgtaggtgaaacgtccggtatccggtcgatagccgttggtctgtaattccatagctgcgttgatgaagctgtacaccggagtttgcgccaatgggaatcccatagtgatatttacgttttgcacatcctgtgggatggagtgaagcacggggaggagcagggcttcgttgcagagcacgatggcgttttccttttcgctgactatctgcgttgtgtgagtctgggttgcttttacccattcgggcaggaagcgggcttgtgcattttcggtggaagcggagatataacgtatctttttcggcttccggaagatgtcgaaataactttccggcagttcgttggggaagtcgatgaggttgcgtttgataaattctccggcttcgtgcttggagattcgttgggtatagaagaggtcgtaatcccaataaaacatggctttcccggctttttgcagcttttggaagaattctttctctactttgttcagtacgttgaaaccgacgaatacgtatttatcgtatttgagccggtcggtatcgagttgttcgataacgttccggtagagcataccttcgtaggcaatgcccagttcggcaagcttctcccgataacgatgatagataatacccagtttgtcccagagggatatgaatttttccttgagttcggtacgccgttcgatggagaagttctgaaagaattgccggatagcttcttcctgttcttcatcgaggaattcgtagtcgtccatcaggttcttcaggtcttgcagattgctgaacagtttgtctgcatccaccatatttttgtctacgtcgtcgaaatcgctaatcagcagttcaccccagaagtagaaatcgtccagcgtctcccgactttcggtttcttctttgaatactttataaagctcacagaccaaacggatcggatcccctgccttttgtacggatagtttctgcaacaggtcactgatactcatggcggcaggcgaccagataggttggtcggattcttctgccaggtattcgttaaaaaacaggttagcgcgtttgttggggaaaacgagcacggtgcgcgacaggtcgtttcctattttcgtatataagtcatgggcgactagttggagaaatggttgcatatcggataatcatttttagtctgtgacaaagatacgatatagaagtgaaagaataagcggaatataggaaattagcttctttaagatatctcgatctgcagaaagttgcttaattgatcaacttttgctatctttgccgtatgaatagaaaagtaatagcatacgaaaactactataaagatttttttgacaccttagataaaggtacacaagaaaaagtcttgtatggcttgctcttattaaagactcaagataaactgcctgcaaagtatgtgaaatttctcaaagatggtttatatgagttaagaatagaatggcaaggtaatatttatcggattttcttttgttatgatgaaggacgcattgttatattattcaatggttttcaaaagaaaacgcagaaaactcccgatagagaaattgataaagcattaaaactaaagaaagaatattatgagcgaaaaagaactgaagatgtttgatgtcgatgcacagttggacgctgtgtttggcaaagaaggaactccggagcgtaaggctgccgaagatagagccaatgctttctttaccgggcagataattgaagaggctaggaagaaagctaaaatgacacaagaggaacttgctaaaaagattgggacaaacaaatcttatatttcccgtgttgaaacaggaaaaacagagcctaaagtctctactttttatcgtattgcttcagccttaggtatgacggttgaattgacccctgctatgtgaaagctaagataaaataatatgaattttcctaatgtctttactaatgaggggatgtcataatgaataataaaacgcagattaacgcaaatcatcgcagaagtttttataagtcgtaactgaaataatctgcgataatttcagttaatcctgcgtttttcccccttctatactttttctatcctctcctcatccacataccacagataaccggtaatattctcgtaccccatcttagaaagtaactgcatatatcccttcacctgcttgttatatttaggattctccttgccaaacttaaagtctactacaaccacctgattctctttcatcatcacacggtctggacggcgggtttgcagcacacctttctccttgtagatgatggcacattcgctgaataacgtccattctcctgagtaccaatcctgtatttcgggggaagagaaagccttttgcaccacttcgcgcaccattccctctttttcatcatcccggataaccccttcaaagacaaggcggtcgatagcggaatcgatgtcttcttccgtctcaatggcggagaataaggtatgcaacaaacgcccgcgattgataaaacgatcgtcggaatcttcctcctcaatgccctgaataaagtccgcagaacggttggattggcggaactcgatgtcgtgccgcatggattccatacggataggacgtttctccggtttttgagtgagtttgttggtcgaagtcttggccttttcttcttccgaagaacaaagttcaccctgctcgtaacactcttcgtcccattctatatcctctttcagcgccactaccggaagaacattcgccaatacttccgacattgtacccttttggcctttcttgctccagatgatgagattctttcctgcacgggtgaaggcaacatagagcagattcaggttatccacccaaagttgcaggcgttcgttcaagtaatcatccccgtagatagattccgccatttgtgtggaataattaatgggaaggatatccagcccatcgaacggagccacctgcggggtacaccacacaagctgaccgttcgtctcgttctccaacttccagtcgcagaaaggaagaagtaccgtatggaactccaatcctttggatttgtgtatggagaagatgcggataccctccacctcaccgcttggaatcgtcttgccgcacaacgtttcgtcccaatagcggatgaatccgtcgagctcggaagagttactttgcagataatccgtcactgcatcgaaaaaggcgaacaggtaagcgtcctgatcgctgatgcggttcatctcgaagatactgaaaagttcctccaaaagttcgtagagaggcattaaccgcagttcttccagcttctcaaggaatgcggaaggaagataattctctacgggaaggagtaggagcgtgttccagtccagccctttccgcagcacttcgttctgataagccacagcaagttgggcacgcgctatcttgttgttcccgtcggagagataacgcaaggcgtccaacatcatgcagatagcgagcgaggcgtcaaggcggaaagcttcgtccgacacgatcttataatgcagctccttgtcaaagtaatcggcaatgcggggaatgttcttgttcttccgcacgagaatcgctatatcattcagccgtacgccggaggagagaagacggttcacctcttcacctaagctgatcaatgtctgttcggtatagtcatgttcctcatcgggttcgaggaacgaaaccttcacgtaacccttttccgttttcttggaagattcctgcacgacatcagcgtaggctttctgcaaatccttgcagtcttcgcccaactgactgcggtatatcccgttcagataatcggcggcggcagtaaaaacacggttgttgaaacagatgatattggtttcgctccgccggttggtagccaatgtccttacatggatggggaaatgctcaatgcggtcgttcagactattcagaatcccccagtcaccattccgccaacggtaaatggactgtttgacatctcccacaatcaagctgtccgctccttgcgaaagcccttcgagcaaaagcagtttgaaatttccccattgcattcggctggtatcctgaaactcgtctatcatcacgttgcggatattggttcctatcttttcgaatacaaaagaggaatcaccgtctttcaccaattgatgaagcagggcattggtgtccgacaataagaaacggttgttatcgtggttcagctggcgcacttcctcgtcgatattggcaagaagctgcactttattgagatgttgcagagacagtcggcaactgttcagcaacaggttattttttgaacggagcttttccgcatcctccaggatatgtatcagactggaatctgccaaagcgatgatgtccgcgtaacgggaagaactttttgccgcccagttctttgcatcctccagacacttctccacagtcgcattgcggatatcgtttcctaagataccattattcagtttacggaaataactgccgattccgcgtgaaccgtttttcagatcgtcggcggttagcgcatggccttccaattcctcctcaaaatgatcatagaaacctttcatttcttccagcacttcggcttccagctctttcagttgcttacggtattccttgatggtgtccggattgcgcaaccgcttccgaagtccttctcctttttcaatatagccctcgtcaaagatattgcgaccgaaacttttcacctcatccgatacattccaacgcttgtcgtcggcaatccgttcgttgatatagtccagcagccacgcgaggacaggagaggtgggaccgagtttctcaatcatgctgtctaccgcatcgctgagtacttcggtattgttcagctcgatattcagattcgggctgagttccagttcccgcgccaggttacgcatgacggattggaagaacgagtcgatggtttccacccggaaacggctgtaatcgtgcaacatatagccgagagcgactcccgccgcttcccgtatttcctgctccgcccttccggtttctttttttatccggtcgagataggcttgggaatctctgtcacctatctgaatgccatatagctggctgagaatacgctctttcatttcagccgttgccttattggtaaaggtaacggccagaatctgacggtaggcacgcggattgaggattaataatttaatgtattccactgcaagggtaaacgttttacccgaaccggcggaagccttatatactaaaagttcactcatgcttattgtaaatctgttaatagaattttttcataaagtccggtccgaaatagaataggaataaatgtaagacaaaaataaggaaaagaagtagagaaaagaaataaaaacacgagatttttttaggaggagtaatcttacatcgtgaaaagattaagtgagcgcacggttgaaatgataataaatgaaaaaaacaaagggaagacgttagtagtttcctccctttagttgtactatatatagattggtcagaaaaatgagtttattcatctatatactatgatttatgcaacagaataaaactgcttctcaacgaaagactattaacccggcttgctgggttcccactgcttactttgcaatgggacttccctttattgccattaatctggtttccgtatttatgtttaaggatctgggagtgtcggatacacaaatcgcattctggacttcccttattatgatgccttggacgctgaaattcttgtggagcccttttcttgagatgttccggacaaagaaattcttcgtactggtgaccgaattgttgagcggagtgttgtttggagtggtggctttttctttattcttcgactatttcttcgctatcagtatttcgacgatggcggtgattgcttttagcggcgcgacacatgatattgcttgcgacggtgtatatatggcggaactgaacaaagaggatcaggcgaaatatatcggtgtgcaaggtgctttctataatgtagccaaactggtagctaacggtggactggtcgctatggcaggtgcattggctgaacatttcggggcgatagagggagcttcaatcgatgccaataaaggtgcgtattcgtctgcatggatgattattttcgcagtaatcgcagtgataatggtattgataggtatctatcatataaaggtactgccttctacacagattccctcaacaacgaaaaaaacgacttcggaagtgggacgggaattggtaggtgtgattgctaatttctttactaaaaagcatattctttattatatctgtttcatcatcctctaccgtttggcggaaggattcataatgaagattgctccgttgtttctgcgtgcgtcaagagaaacgggcgggttgggactgtctttgaaggagattggtacattgaacggaatttttggttctgccgctttcgtgttaggttcactgttggcaggtatttatgtatctaagttcggattgaagaagactttgttcactctctgctgcatcttcaatcttccgtttgtggcttatactttccttgcggtggtgcagcctaccgatgtgtatctgataggaacgtgcattacgatggagtattttggctatggcttcgggtttgtcggattgacgttgtttatgatgcaacagattgctccgggaaaacaccagatgtcgcattatgcttttgcatcaggaatcatgaatctgggagtcatgctcccgggaatggttagcgggtatttcagtgacctgctgggctaccggaacttctttatttatgttctgatagcaactataccggcttttctgattacttatttcataccgtttacgtatgacgattcaaaaaaataacaatataaacaatcaaagatcatgaataaaattcaaattccttgggaagatcgtcctgcaggatgtgcggacgtaatgtggcgttactcacaaaatccagttatcggacgttatcatattccttcatccaatagtattttcaatagtgccgtcgttccttttgaggatggttttgcaggcgtattccgttgtgataacaaagctgtacagatgaatatctttgcaggttttagtaaggacggaattcattgggatatcaatcatgaaccgattcagtttaaagccggcaacacggagatgatcgaatcggaatataaatatgacccccgtgtgacgtggattgaagaccgttattgggtgacttggtgcaacggttatcatggtcctaccattggcattgcttatactttcgattttaaggagttcttccaatgcgaaaatgctttcctgcctttcaaccgtaacggtgtgcttttcccgcagaagatagacggtaaatatgccatgctgagtcgtcccagtgataacgggcatactccgttcggtgatatatatatcagttatagcccggatatgaagtactggggagaacatcgttgcgtgatgaaagtgactcctttcccggaaagcgcctggcagtgtacgaagatcggagccggttccgtacctttccttacggatgaaggctggttgctgttctatcacggtgtgattactacctgcaacggtttccgctatgcaatgggagctgccatacttgataaggatcatccggaaaaagtgctgtatcgtacccgcgaatatttgttaggtccggctgccccatacgaactgcagggagatgtgccgaatgtagtattcccttgtgccgcattgcaggatggagaacgtgtagctgtttattatggcgccgccgacactgttgtgggtatggccttcggatatattaaagagattatcgactttactaaacggacaagtatcatttaataaagccatgaaacgtattctattaacttacacacttgctttcgcccttcttcccgtatatgcgggggagggtggaagcccccccgctgataagagtcttccggttgattacgtagatccttttatcggaacgaccaatttcggcacgaccaatcccggagcggtgtgtccgaacggaatgatgtccgtagttccttttaatgtgatgggctcttcggaaaacacgtatgataaagatgcacgatggtggtctactccatacgaatataccaattgtttctttacaggatatgctcatgtcaatctgagcggagtaggttgtccggaattggggtctttacttttaatgcccactaccggagagctaaatgtggattataaagaatacggaagtaaatataaggatgagcaggcttcaccgggctattattccaattatctgacaaaatataacgtcaagacagaggtttccgctactccacgtacaagtatcgcccgttttacttttccaaaaggcaaaagccatatattgctgaatttaggagagggactgacgaacgaaagtggtgctatgctccgccgtgtcagtgattgcgaggtggaaggcatgaaactgctcggtacgttctgttataatcctcaagctgttttccctatttactttgtgatgcgggttaaaaaagtcccttctgcaaccggctactggaagaagcaacgtccgatgacgggtgtggaagctgaatgggatgcggatcaggggaagtataaactctatacccgctatggaaaagaaatagccggtgatgatatcgggacttatttttcttttgaaacggaagagggagaacaggtggaagtgcagatgggagtttcctttgtgagcattgaaaatgcccggttgaacctgaaccgtgaacaggaaggaaagaattttgagcagattcttgccgaagcgcatgctaaatggaatgacgacttgtcacgtatcactgtagagggcggaacggatgcgcagaagactgtgttttatacggcactctatcatctgctgattcatcctaatatcttgcaggatgccaacggagaatatccggcaatggaaagcgataagattatgacgacaaagggagaccgctatacggtattttctctttgggatacgtatcgcaatgttcaccaattgttgacactggtttatccggaacgccagatggagatggtacgcaccatgttggatatgtatcgtgaacatgggtggttgccgaaatgggaattgtatgggagagagacattgacaatggaaggcgacccaagcattccggtgattgtagatacatggatgaagggtttgcgtgactttgatgtggagctggcatacgaagcgatgtacaaatcggctacactgccgggagcggacaatctgatgcgtcctgacaatgacgattatctgtcgaaaggatacgtgcccctccgcgaacagtatgacaattcggtatctcacgctttggagtattatattgcagattttgcactttcccgttttgcagaggctttgggtaagaaaaaggatgcggaactgttctataagcggtctttagggtataaacattattatagcaaggagttcggaacgttccgtccgatattgcctgacggtactttttatagtccgtttaatccgagacagggagagaacttcgagccgaatcccggttttcatgaaggcagctcctggaattatacattttatgtgccgcatgatgtatatggactggcaaagttgatggggggcaagaaacgtttcattgacaagttgcagatggtgtttgatgaaggactttatgatcctgccaacgaaccggatattgcatatccttatttgttctcttattttaaaggagaggaatggcgcacgcagaaagaaacgcaacggttgttggataagtattttacaacgaagccggatggtatccccggaaatgatgatacgggaacgatgtcttcatgggctattttcaatatgataggtttctatccggattgtccgggattgccggaatatacattgacggctccggtattcgacaaggtgactattcgcctggatccgaaatggtataaagaaaaggaattagtgattgaaagtaatcgcgcccaaccgggaactctttatatcaataaggtgttactgaatggaaagaagttcaataaatatcgtatcacacatgatgaacttgttcatggtcaacatatatattttgatttgaaatgacgcacagtgtttcataggtatcgtttttgggttgacagggctgtcggacatttcagggtccggcagcccatttttcttctcattcttttctcattcttttctcttcttctctctttccttcttttattttcttctttgtgttataagcgattacaaaattctctttcattcgtctagtacataaatcgtgtataaaatagaatgataatgaaaaggaatttgttgaagtgtatcctatgggtattactgcttgccggatgtttccctctattggccgttgccggagcgcaacaaaaagaacagcgttataagattgccgtatgcgactggatgattctgaaacgtcagaaaatcggttcttttcaattggtgcatgaattgaaaggggatggcgtggaactggatatgggcggtcttggcaaaagagaaagatttgataataagctccgtgaacctcatttccagcaactgtttcgggaaactgcacagaaattccaagtagaagtttcatctattgccatgtccggattttacgggcagtcttttttagaacggactaattacaaagaattggtccgggaatgtttggacgccatgcaagtgatgggggctaaggtagcttttcttccattaggaggtattaaggccggatgggagaatgagccggaacttagaacggcagtagtaaaacgtttgaaagaggtaggagatatggcagcttccgaaggtctggtcatcggtatagaaactcagcttgatgcaaaaggggaggtgaaactgctgaaagagataaattctcccggtatcaagatctatttcaaatttcagaatgcattggagaatggacgggatttgtgcaaagagcttaagattctggggaaaaagagaatttgtcagattcattgcacagatacggacggagttaccctgccgttcaacaagcggctggacatgaataaggtaaaaaagacgctcgataagatgggatggagcggatggctggtcgtggaacgctcgcgagataaggaggatgtaaggaatgtgaggaagaattatggaacgaatatcgagtacttaaagaaggtgtttcaagagtgatagggttggggagatgtgtagtccttagtttgaatgaaaagattttttcattttactctttttaagtgattacaactttcttagttatacgtcttaatattgaatatattatatattaatttaaatattttacgtgatgaaaaacaatttaaaattcttgcgtaggaagagtataggcatggctttaattggggtgctgactttttttacagcttgtgacaaagggattgatgccgatgaagtttttgtcccgaatgtaacaaactcgactttggagtcacctaaggctgatgatgttacgataacactatctccggatgggactaaactagtagtagcatggccggtagtagacggtgccggtggctatgaatttacactttacaatgtggataataatgaaaatccgattgtggtaggtattgaaaaggaaatagtagatggttgcagtgtgagcagaatagtagagtcggatactcaatataaggctgtgattcgtactttaggcaatgccaaatataacaataaagaggctgaagttgcatctgaagtaccttactccactttagcactttctgatgccactatagagagcggtagcattaacgaatggttgaaagccaatcctattcctgaggataagatcggtcaggagtatactatcgacctcgtgggcggacaggaatatacactggacgatgttattgattttgctgatcagcaggttactattcgtggtagcaaagtgaatcatgccaaaattaagatgaccggcaatgcgtcgtttcttacgaacaatggtttcaaactgaagtttgcagatattgattgtaagaatttagagagtgagacgttgttgggcaccagcactactcctgatgaaggatcgcaggtggcgacaggagaatatgttgtaagcaatcctattatgctgcaaggatgcaatgtgaccggtttgaatcgttatttgttttatgatatgaataaggtaaagtattgtatcgattatttgggtttcagtgattgtaatattcaggtgcagcaaaatgatatattggtacgtgcagctaagagctctattatccgtatggatatagtaaaatctaccttgtggagtacacagcaagccggtaagcattttatgcaaatcagcggtcaacgtcccaataaaatatccggtcgcacgggtgccgagtttaatttcctcaatactacattctataatatagcttacagtaaggattttgttaattggaattattatcgcggacaatcttgcgtatttttgaatttccagaataccctttttgtagattgcggtaataatgatattactaacaagatgcagggtaatgctaacatgaagcatgattacaagaataatgcttattggtataataatgcggaaggtaaggataaatacgatactacagctacctttagcgatcctcagatgaaaaatccgaagaaaggcgactttactttgagtagtactgaacacatagccaagcgaattggtgatccccgttggcttcctgaagaaatagtagaataatgactcatattagaatttatactaatgaataaaaaacaatttataaaaagactgtgtttgggcgcaatgctttcgatagctacgtttacagtttttgcgcaggagcgtgtggtaaaaggacaagtagtcgatgaaaccggtgagccggtaatgggtgccacagttgtggtggaaggttcgactagcaatggtgtgattaccgatattgatggaaactatactattacgatatcgggtaaaaagaatctggtgatttcattcatcggatatactacgcaggttatcagcgatttgagccaaaagaaaatagtactgaaagaggatgcccaacagctcgacgaggtggtagtagtagggtatggtgtgcagaagaaagctcatctgacaggtgctattgctactgtgactatggatgatattcaggatttgtcggactcggggctggcttcttcactgagcggtatggttaatggtatgagcgtgagtggcggacaaagccgtccgggcgagaatgctaaaatctatatacgtgatacaaactcatttggtgaagtgggtagcacggcgcaagagcctttgtatgtaatagacggttacatctatcccgatgatatcaaggtaggtaacacacgtgaaaatctaggtgcgcaagcattcaataatctcgatccttcggttattgaaagtatctctgtattgaaagatgcggcagctgctgtttatggtgcgcgtgcggctaatggtgtaattttggtaactactaaaaagggtaaagccggtgctcctcaaatttcttatagtggcagctttggatttaccgatgaactttcgcgtcctaagatgttgagcgcctatgattacggacgactttataacacttgggcagccggtgatcctgccaatacttcgcttaacctgaagactgatctctatcaagcagatgaactggaagctatgaaagggctgaatttcgacttgctcgacaaatattggaagaccggtttcactcagaaacatagcgttaatatcagtggcggttcagaaaaagccaattactttgccggtgtttcgtattttgaccaagacggtaacttaggtgacctcgagtacaatcgttggaactatcgtgccggtgtagatgtaaagattagcaagtgggtgaaagcgaatcttactgtatcgggtgattatggcaagaagaacaaaccgaatgtaaaagtgggcggttcgagcgatgaaaaagactacaacctgttactcactcgtccgacttatattcccgaaaccgtgaacggattgcctatctcggctttgggtatcaccaactccgtacaaaatgatgaccagacttattctttctcagtgcttcagaacaacggtgactataatcgtagcatgaattcgaatatgactgttaacggtagtttgagcttagatatgggatttgtaaaagtcttgaaaggcttggaactgaaatttaattatggcaagagtatcagtactgataagaataatcaatacggatccagctattctatctatcgcatggtcaatcgtaccggtagcggtaaccacctctatactcctgtggatggtcaggattataatgactttttggcggaagataattttattctctctacaattgctaatggaagcccttcttacttgcaacgtagcactactcgttcggacagttatcagatgaactttaccatgaactactctcgctctttcggtgagcataccgtaggtggcttattctctatcgaacgttcggaggctgaaagtgaatatcttatgggaaaggtgaatgagccttatgaatttactaccggacagtccaattcggctaccggtgacaaaaatactgtattctcccgttctgagtctggctccttgtcatacatcggtcgtgtgaactatgcttatcaggataagtatttggcggaggtactgttccgtagtgactcttctaccaagttcgctcctgaaaactattggggattttttccttccatgtctttgggttggattgtgtcacaagagaaattcatgcgcctaaagtgggtagaatatctgaaaattcgcggttcattcggtttgaccggtcgtgacaataccgctccttggcagtggatgcagatttactctaccgagtcgggcaagggtcctgtatttggtactaccggtaatattaatgcttcgaagcccatctctattaacaaatataattcagcggtaaaccgtgatgtgcattgggacaagtcgtataaagcaaactttggtattgattttactacacttaacagccgattggctttcaatgtagacgcttattatacttggaatagagaaatgttgatgaatatcgaacagactgttcctactactgtcggtacacaatcggccgctgtcaatctgggtgagatggacaactatggtattgaaatctcggcaacttggcgcgaccgcatcggcaaggatttcaaatataaaatcggtatcaataccggttatagcgataacaaagtactgatgatggactttgaagaagaatatctatatcgtcaaatcactaagggagaccgttccgacatcggtacttggggaatgcaatgtatgggtatgttccgtagcttccaggatatcgaagaatacttcaatacatatcatattaccgattatatggggttgactaaagacgaagttcgtccgggtatgttgatttataaagatgtgcgtggagcccagcaacctgatggtacttatgcagctcctgatggtatagtagataaagataatgaccaagtgcatctctctaaccgtagcaatccttggggattcactaccaaccttagtgctgaatggaaagggatctcaatcgcagctcagcttagtgccagttggggaggctatagtatcattcccggtcaggcattgaaacccggcaaaagcatcgagtacaccaatatgccttcgttctggaagcccgacaatgtatatgtgtacaatgatatttatgatgcttccggcaatttgctaatgcctcaaaacagagaaggctcactacctaacttgaaatattcagatataaatgctgtcacttcttctttttggagagtcaatggcacacgtgtaagtttgaatcgtatcactttggcttatgcattgcccaagcattggataaagaaggtcggtttgagtagctgccgtttcaatatcacaggtcagaacttgctgagtctctacaatccttatccagaccactttatggatcctcaatgtagctacggttcatatcctcgactgagaaagttcactattggtgtgaatgtaggtttctaagttttataatgctaaatgaaaagaaaagaatgaaaagaataatatttagcgctgcattaatggcagcattaggtctctcttcttgcagcgaccagttcctggaggataagcagaattttgataatgtaactagtgaagtatacaacgactatgcaggtgctagtggccgtgtactcgacctttattggtggattttacctgatcccaattcggatgcaaattggaagtacccgtgtaccggtaaagctgatgggatttctaaatcaaccgaagagtatagtggatttggtttatttgtaaatccacaggctgagctctcggttttgggtagcaacaaagtacccgattattttcataatcagagtaacaacatccgtgagtcggtatgggggcgaatccgcaattgcaatgatgtgattgccggcatcagtggcagcagccttaccgaagaacaaaaaaacgaactgttaggtcaggcgtatttcctgcgtgcatggtgctattatagtatggtaaagtggtatggtggtgtgcctatagtcactaaggtacaagatcctgttgaaagttctttcgttcctcgctctacaacgaaggcatgcattgaatttatttgcaatgatttagatatcgctgccgatatgttacgtgcaaagaccaccaatggtggatggaatggcgacaactacggtcgtgttactactgcttcggctatggcgttaaaggggcgtgtgttactgttgtgggcaagtccgcttttcaatcgtgccaacgatgagagtcgttgggctgctgcttacgaatatatcaaagaatctatcaaagatatcaatgcttgcggtaaccatctttatactacaggcaataatatcaatggttcggactttgccaagatgtttactgttattcagaatccggagatggtatttggtaccttgcacaatatgaagcaagacgatgatacaaagaagaataataactgggaacgtttcatccgaccgaagaataccacaggacagggtttagaggcatcggctatgtttgtagatatgttccccatgaaggatggtaaacgtccgcgcggtttgaatacctataaaaagctgaatgagagcgaagacgaggcgaatataaaagactatcctttcatgaatcgtgatccgcgtttttaccgtacctttgccatgcctggtttccgttgggcttacacaggcgatcctgttccggcggatgcgttcaaccccagctataacagtggtaaggattatgtattgtggaactatgtgtggtatgccgatccggaagatgtgaatgatccggaaagtggtaacgcttatggcgctgataatctgttgaaaaatagaaagggtgtatatgtacgaaaacgtagtaacgatggtgacatttctgagcccctttattcatttaatgctacttatgataatggtggttttgcatattctgcagctccttggatggaaattcgttatgcggaagtattgctcaactacgccgaagccgcttgcggtgcagggcacatgggtgaagcggtagagcaactgaaactgattcgtcagcgtgtcggttactcaggcgattgtggcttgcaggaaaacctttctaccgatcaggctgcttgtatgtccgccgtactctatgaacgtcagattgagctggcttacgaaggcaaacgttttgatgatcttcgtcgttggatgctttttgatggtggtacggataaagtagatggtgcgccggcatcatggacgcttaccggttggggtggtaacacttgcacatggctcggttttaccgaactcaataaaaatcagcgtcgtgataatatggagttccgtcttaatgatactaagtatggtgtaggtggtactaccggtgatacagatagtgatcccttgttgaaagcaggtgtagaacgtccgaaaggtatcgacttccgtaaagaaatcagcgatgaagaaggaaaccaattaactcaacttcaagaattttacaacgaacattttgttcgtaaggagaagaaaggtgacgcttatgcaacaaacaaagaccccttatatataaagttcttgcctcgctactactttctcggtttcagtcaaagtgctttaaataattgtaaaggtattgagcaatgtattggttgggaagattcgaacaacggaggtagtaacggaacatttgatccgttagccgagtaatagtttctctacttctttttttgaagtgacataaacgagaaagtcaccatttcctatcatctttcaaaagaaagacttaggaagtggtgactttctcatttacgcaccaaataaaacaaaaccatatgaaaatgctagaatcagtagtaactgataaaaactatttgattaattacaaacaagaatatacaggaataagatggaagagattgttaggcgttatccgataggtgtactgaattttgaagatttacgtaatacaaattatgtctatgtagataagactgatttagcttacaaattggtacattctaaataaagtatattttcttagccgcccccgacgtttcggcaagagtttgcttgtgtccacattagaagcttatttcaatggaaaaaaagaactgttcaatggtttggcaatggaacgtctagaaaaggaatggaatgtttatccggtgttacgcatggatttcagtatcagcaaattcagccaaatgagcatattctatgagttaaataatttacagaatatcagtttgcgggatgaatatagtgctatatgcggaattactgagaaagaattacgtagcgaattgaaaacggatattgagattattacccaagcaaatgaagaaacgtatgaagaggcttgtgctcatttgaaattacagtatgacggttatcattttagtaaaagatgtgaggatatttacaatccgtttagtttgttcaatgcttttgtcggcaaaaattatgaaaacttctggttctctacaggtacacccacctttttgatagaactattaaaacaaagtcaatttgatattcgtgaattggataatacgacagcaactgtggaacagttcgatgcacctaccaacgttattactgaccccattcctgtactctatcaaagtgcttatttgactatcaaaggatatgatcctgattttgaactttatacacttgcataccctaataaagaagttcgtaaaggctttatcgaatcgcttatgccagcttatgtacatttgccagcccgtgaaaatactttttatgtggtgtcttttatcaaagacctgcatgtcgggaatataggtagctgtttggaacgtatgagaagtttctttgcttctatacccaatcagaacaataaggaggaaaaacattatcagactattttctatttgttgttccgtttaatggggcagaatgtggatgtggaagtgaatactgctataggacgggcggatgcggttgtaaagatgcagaatgccattttatgttttcgaatttaaagtggacgatacgccggatgatgcttttgcacagataaacagtaagggatacagtatttcatatcaggcagatcatcgggcggttgttaatattggtgtaaatttcgatagcactacacggaccattggaggttggaaaatagtttctgcccccacatctaataaaaaatcaccattactgattacaaatctttttctttttcgtcttattattgtatttttgaattaacaacttcacaaaacccaataaaaaatgaagaagaaatatgtacttttagcagcttttgctgcggcaatgttgactccgagcgttgtatgggcacaatacccacagataacagacgaagccaaagaaaattataaaaagatgatgactgaagaacggaagcgttctgatgaagcatgggcaaaagcgttgccaatcgttctgaaagaagccaaagaaggtcgtccgtatataccttgggccggtcgtccgtatgatttgccccaagctgatattcctgcatttcctggtgcagaaggtggtggaatgtatagcttcggtggccgtggaggtaaagtgattaccgttaccaatctgaatgaccgtggtcccggttctttccgtgaggcttgtgaaacaggaggtgcacgcattatcgtatttaatgttgcaggtatcattcgtttggaatctccgatcattgtacgcgctccttatgtaactatcgccggacagacagctccgggagatggtgtctgcattgccggagaatcattctgggtagatacgcatgatgtggttgtacgtcatatgcgtttccgtcgcggtgagacaaaggtctggcatcgtgatgactcttttggaggaaatccggtaggaaatattatgattgaccactgttcatgtacttgggggttggatgaaaatatatctttctatcgtcatatgtatgatccgagcgaaggacagtatgaaagcaaagatttgaaactccctactgtaaatgtaactattcagaatactatttccgcaaaagcattggatacttataaccatgcattcggaagtacgttgggaggagaaaactgtgcgtttgcccgtaatctgtgggctagcaactcaggccgtaacccttctatcggttggaacggtatattcaatttcgttaataatatagtgttcaactgggtacaccgttcttccgatggaggtgattatacagcgatgttcaatatgattaataactactacaagccgggacctgccacacctaaagattccaatgtaggacaccgtatcttaaaaccggaagccggacgtagcaagctggatcataaagtatacggacgggtatatgccgacggaaatatcatggaaggttatcccgagattacaaaagataattggaacggcggtattcagattgagactcagccgaataccgacggatatacagagtatatgagaagctaccaaccgttcgaaatgccatatattaatattatgagtgcaaaggacgcatacgattatgtattgaaacatgtaggtgcaaatatcccttgccgtgacattgtagacgaacgcgttatcgaagaagtaagaaccggtattccttattacgaaaagaaacttccgaaagatgcatacggtgatttgacaggattggctccaaagtcaatgggtgaagacggacagtttaaatatcgccgtctgccgaaagattcatacaaacaaggaatcatcacagatattcgccagatgggcggttatcccgaatacaaaggtactccatacgtagatacagatggcgatggtatgccggatgagtgggaaaaagcgaatggattgaatccgaacgatccgagtgacgccaataaagactgtaccggtgacggatacactaatatcgaaaagtatatcaatggtatcagcactaagcacaaagtagattggagagacttgaaaaacaactatgatactttggaggaaaaaggaaagttaatgtaaatgatgaagttaacgtaaactaaggtgctgaaatgtcattattatactaaaaaataatatcaatgaaaaagatactgataatttctctgttactgctctctacttggatgtccgccggagcagttgacctgaacaaagagaaccgtgatccgaaatatgtggagtctattgtcaaccgttctcagaagattgtagataagttgggactcacagataaacaggttgctgaggatgtccggaatatcattgccaaccgttatttcgaattgaacgatatttatgagatacgcgatgcgaaagtcaagaaggtaaaagaatccggattgacgggtgaggctaagaatgaagcattgaaagcagccgagaatgaaaaagatgcggctttataccgttcccatttcgcatttcccgccaatttatctcttttccttgacgagaagcagatagaagcggtgaaggacggaatgacttacggggttgtgaaggtgacctacgattctcacctcgacatgattccgacacttaaagaagaagaaaaagcgcaaatatacgcttggttggtggaagctcgtgaatttgctttggacgctgaaaattcaaataaaaaacacgctgcttttggaaaatataaaggacgtatcaataattatctggctaaacgcgggtatgacttgaaaaaagaacgtgaagaatggtacaaacgtgtgaaggcacgtggaggatccttataagattctcttcccataataaaaatggttagtttgtttgatgacggaaagggtggctcggagagtcgcccttttatcgtatataaaattcaatcggaagatgaagattcttcgtttatatttgagtacaaattagtccttttatcgtctcctttgtataaaggatataatttatagattataatagcaatgaaaaggttaaaagatacattagcggcaataggtattttattttttgtttcttgcggaggaagcaaggactattatatgtttacttcgtttcatgaacctgctgatgagggcttaagatatttatatagtgaagacggaatgcattgggacagtattcccggtatctggctgaagcccgaattaggacaacatcaactgttgcgggacccttcgatggtacgtactcccgacggaacttttcatctggtctggacgacaagctggaaaggcgatctagggttcggctatgcaaactccaaagacctgattcattggtcaaagcaacagatgatacctgtcatgacagaagaaccgaccacggtcaatatatgggctccggagattttctatgatgaagatagtgaacagttcatggtagtatgggcttcttgcattcccggccgttttgagagaggaatagaagaggaaaacaataatcatcgtttgtattatatcacaacgaaagactttaagactatttctaaagcgaaagtcttgtatgatccgggattcagttcgatcgatgcagtccttgtaaaacgggataagaacgactatgtgatggtacttaaggataatacccgcccggaacgcaatctgaaaatcgcttttgccgattccctgacaggaccttactcacctgcgtcgcaaccatttaccgaatcgtttgtagaaggtcctactgtagaaaagataggagaggagtatcttgtttactttgatgtctatcagaaaaagatatacggtgctatgtgcacaaaagattttataaattttaccgatgtgacgagtgaagtaagtgtacctgccggacataaacacggaacaatattcaaagctcccgaatcggtagtaaaagcgttgttgacacatacccgccttaatcactaatcattcaccgataatcactaaataacatgaataactctacaaagattctctttgcattggctgccggatggttgacatctacggttgcagcgcaagacagaattcattacacaggaacagaattatcgaaccctacttatcacgacggacagttgtcgccggtggtaggagtgcataatatccaattggtacgcgccaaccgggaacatcccgatccgtcgaacggcaatggatggacatataaccatcaaccgatgttggcctattggaacggccagttttattatcaatatctggctgatccttcggacgaacatgtaccgccttcccaaacatttctgatgacatcaaaggatggctatcaatggacgaacccggaaatagtatttccgccttataaagttccggacggatataccaaggaatctcgtccgggtatgcaagccaaagatctgattgctattatgcaccaacgtgtaggtttctatgtctccaagtccggccgattaataacaatgggaaattacggagttgccttagataagaaagacgatccgaacgatggaaacggtatcggtcgggtagtacgcgaaataaaaaaggacggttcgttcggtcctatttattttatttattacaatcacggatttaacgagaagaacaccgattatccgtatttcaagaaaagtaaagaccgcgagtttgtgaaagcctgccaagagattcttgacaatccgctgtatatgatgcaatgggtagaagaggcagaccgtgaagatcctattatccccttaaagaaaggatataaggcatttaactgttacacacttcccgacggaagaattgccagcctttggaagcacgcgctcacttctatcagcgaagacggaggatatacttgggaacaaccggtactccgtgctaagggatttgtcaatagtaatgcgaaaatctggggacaacgtttgagtgacggcacatacgcgacggtatataatccttcggaattccgttggccgttggctatctcattgagtaaggacggactggagtatacaacgctgaatctggtgcacggcgaaatcacgccgatgcgttacggtggtaattataaatcatacggtcctcagtatcctcgtggcatacaggaggggaacgggatacctgcagatggcgatttatgggtttcttatagtgtgaacaaggaagatatgtggatctcccgcattcctgtgccggtggaactcaatgcttctgcacatgccaacgatgacttttcaaaatcgaaagcaatatcggaattgactgattggaatatttactccccggtttgggctccggtttccctggatggacaatggttgaaactgcaagataaagatccttttgactatgcaaaagtggaacggaaaattcccgcttctaaagaattgaatgtctcctttgatttgcaagccggacagaatgataaaggtacgcttcagattgaatttctggatgagaatggaattgcctgctcccgtttggaactgacacaggatggtgtttttcgtgcaaaaggtggttcccggtttgcgaatatgatgaagtatgaagcaggaaaaacctatcatgtagaagctgtcctttcaacggctgaccgtaatattcaagtatatgtagatggcaagagggtagggctgaggatgttctatgctccggtggcaagtatcgaaagaatagctttccgtacaggcatgccacgtacattcccgacagtggatactccggccgaccagacatacgatttgcccggtgccggtgaacaggagccgatggccgaatatcgtatagctaatgtaaaaacgtcttccgcagacaaggatgcatcttccgctttcttgaagtataaggatttcagccattatgcggattattttaatggaatggaagatgagaatatcgttcaagcgattcctaatgcaaaagcttcggagtggatggaagacaacattcctttgtttgaatgcccgcaacgtaattttgaagagatgtattattatcgttggtggtcgttgcgcaagcatatcaaggaaactccggttggatacggtatgacggaatttctggttcagcgttcttattcggataaatataacctgattgcctgtgcaatcggacatcatatttacgaaagccgttggctgcgtgatccaaaatacctggatcagattattcatacatggtatcgtggcaatgatggcggtccgatgaagaaaatggataagttcagttcatggaacgcagatgctgtttgggctcgttacatggtagatggtgataaggactatctgctggatatgaagaaagatctggaaaccgaatatcagcgttgggaacgtacgaaccgtttgaaaaatggattgtattggcagggtgacgtacaggatggtatggaagaatcaatcagtggcggacggaggaagaaatatgcccggccgacaatcaatagttatatgtatggcaatgccaaagcactttcatgtataggaattctttccggtgatgaggggatggctatgaaatatggcatgagagcagatactctgaaaaatctggtagaaaatgaattgtggaatacacgtcatcagttttttgaaacgatgcgtacggactcttctgcgaatgtgcgtgaagcaatcggatatattccctggtatttcaacctgccggataccacccaaaagtatgaaattgcctggaaagaaattatggatgaaaaaggcttctctgctccttatggactgacaaccgcagaacgtcgtcatccggaattccgtacacgcggagtaggcaagtgtgagtgggacggtgctatctggccgtttgcttccgcacagacattgacagcaatggctaactttatgaataattatccgcaaactgtattgtctgacagtgtatatttccgtcagatggaattgtatgtggaatcacagtaccatcgtggtcgtccctatattggtgaatatttggatgaggtgaccggttattggctgaaaggagatcaggaacgtagccgttattataaccattccactttcaacgacttgataattacaggactgatcggacttcgtccgcgtttggataatacgattgaagtgaaccccttaattcctgccgacaagtgggattggttctgtttggataatgtattatatcacggtcataatctgacgattctttgggataagaatggtgatcgttatcattgcggaaaaggattacgcatttttgtagatggtaaggaagtagggcaggcggatacattgacaaaaatcatttgtgaaaatgcactcaaatggtaagttcaccacagaggacacggaggacgcagagctcttctctctgtttccgtaagtaaaacagagagacaaatacgattataaatacgtgagactctgtgttacttatagcgaataaaaaagattaaacctctgtgtcctccgtgtcctctgtggtgaacttaccatttatcgaacaaataaaagatacttgaaaaatgaaattcaaaaagattcttctttcattgctaatttgtttgtcttgttttgtacaggcgaagaatataaccatcagtcgtcttacctgtgagatgcaggagggattggtagtggtcgaaggttcaccccgtttgggctgggtgatggaatcgccggaaaatggaacacgacaatctgcctatgagattgatattcgggaagcttttacagggcgttccgtttggaatagtgggaaggtttattcttcgcagagccagttagtttctacaaagggggcagatatacgtcctgataactcatttaattatagttggcgcgttcgtgtttgggatgaaacagatacgccttccgagtggagcagtgaagcgaaattccgggcagtacccgaaaggttatcttcggggcaatggattggagctattacccgacaaaatgctcgtttaccggaagggcgtaagttccacggtggagagttgaagaaaccggaagtgaaagcagcttgggaagcagtggacactttggcaaagaaaagtatttgtttgagaagaacattccaggtaggagatgcgacagaagggggtacaaaccgaaaaccgggcaagaaaatagtggaggcaacggcatacgtttgtggtctgggattctatgagttttctttgaatggcaaaaaggtaggtaacagtgagtttgctccattgtggagtgattatgataaaactgtttactataacacatacgatgtgacggaacaattgcggcgtggtgaaaatgtcgtaggaatcttattggggaatggattctataatgtgcagggggggcgttatcgcaaattacagatcagttttggtcctcccacacttttatttgagctggttattaactacgaagatggaacatgtacgacagttcattcagataatgactggaaatatgattttagtccggtaaccttcaattgcatatatggaggggaagattatgatgcgcgtcgtgaacagaaaggatggaatcagattggctttgatgacagtcactggcgtccggtagtcatacaggaagctcctaaaggaatacttcgtccacagatggcggctccggtgaaaatcatggaacggtatgatattcaaaaggtaacaaaactaaatgtggaccaaattgcatcagcttctgtatcaacaaagagaacagtcgatccttctgcttttgtgttggatatgggacagaatctggctggctttccggaaataacagtacgtggtaaacgtggacagaaagtgactttgattgtagccgaagcattaacggatgaaggtgcttgcaatcagcgtcagacagggcgtcagcactattacgaatacattctgaaaggggaaggcgatgaaacctggcaccctcgtttctcttattacggttttagatatatccaggtagagggtgctgtcttaaaaggacagaagaatccgcagaaattgcctgtattgaaaaatattcaatcctgtttcgtatataattcagccaagaaagtttccactttcgaatcatccaaccggatatttaatgctgcccatcgattgatcgggaaagcgattcgcagcaatatgcagtctgtgtttacggattgtccgcatcgtgagaaacttggatggctggaacaggtacatctgaatggtccgggtttgttgtataactatgatttgacagcatacgctccgcagattatgcagaatatggcagatgcacaacattccaacggagccatgccgacaactgctccggaatacgtgatttttgaaggtccgggtatggatgcttttgccgaatctccggagtggggtggttctttggttattttcccttttatgtactatgagacttatggagacgattcattgattaagaaatattatctgaatatgcgtcgttacgtggattatctcaagactcgtgcagataaaggtattctttctttcggattgggagactggtatgattacggagattttcgtgcgggattctcacggaatacacccgttcctttggtggctactgcgcattattacatgacagtcatgtatttggtacaagctgcgaaaatggtaggtaatgactttgacattcgttattatacttcgttggcacaggatataatggttgcatttaataaatgttttcttcataaagatatggcacaatatggtacaggaagccaatgcagtaatgcgcttccgctgttcctccaaatgacgcaggatgcagatgaacaaggtaactaccggccggatgcagatttgaatgagaaagtatttgcgaatctgataaaagatgtggaagcacatggcaaccgtttgactaccggtgatgtgggaaaccgttatctgattcagacattggcgcgtaatggggaacatgaacttatttataaaatgttcaatcatgaagaagctcccggatatggtttccagttgaaattcggcgctacaactttgaccgagcagtgggacccccgtcaaggttcttcctggaatcactttatgatgggacagattgatgaatggttctttaattcactggtcggtattcgtccttctaccactccaaaacaaggttatcagaagttcatcatcgctccccaacctgtgggagatttgaaatatgtcaaagcgtcgtatgatactttatacggtaccattaatgtggactggacttgtgagaatggaacttttactttaaacgtgtctgttccggtgaatactaccgctgtcgtttacctcccgggcgaaaaagaaccgaaagagatacagagcggaacatatcaattggtttgtgcaaaatgaaagagacattttatatatatttgtagaatgaagttatgaaaaaggtctaagatattgaaaatgagcataggttattcgctcattatggtaataggttacgaataagagagttatctccttaaatatacttctgcgcgttgcgtaaccttcaaagaactcttcaagtacaaaagtacaaataaaacgggagattacgacagaatctccctacttttttcactctaatttggcttttccgtaaaagcgatttaactccgtcggtacaccatagccaaaacaagttttgacaaccatgtcccgactatccgcataagcgaagaaaagggctttgcctcatgcctaaacaacaagtttagactgatgaagcaaggcccatttcttttgggcttatgccacaaaggtgcttttacggattttctgagttttttttcttttgctgtttttttgagccggtagcagaaagctgcatgtgaccgcccgcccataaatgggacaagccgtcacccacagcaggcaaaccgggaagaatggtttatttgcccgaccaaacgggtttggccagacggataaaccacacttccttgcaggtggtttacccggtttcacgcttccggcagtatttcctttctctttgtcttttcttctttttgtggatttctctctgaagttttctctcgaatctgcctctacttccgtttacctccatttttacgcctttcagtagccgcatcagtcagtcattttcgttctgggcgcaaaggtaattccgggattttacggggatgcaaggtcgagcatcctgttttctggaaaaatctccagccctgcgggtagtatttttccgaaaaaccttgcatcccctaatccctacctttttgagcacccgaaacgaaaacgaccgatgcgacagaaagacgcattaaaaaaaatgtcggataaacgagaggcagataagatagtttgaaactcaactccctcagctcttgaatccgcattaaaaacaaaaaaaatcaaaaacaacgtagatatgacaacaacggcaaatttcagacaagtggcgcaatacataggacttgcagtatgcggtttaatcctgcgcaccgccttcgggatgttcggcatcctcttgtggaaaatataaagtcgattgacccattattatactcttaattgacccatcaaaatatcttagaattaagtagagaaaaatgcattttaacccgggtcagtttcaattataattctttacagtagatactacttctttttagcattaatctttcttacagaatctcccgttagttcaattttgtgtgcagtatgtacaattctgtccaggattgcatcagctacagtaggatctccaattgcatcataccagctttcaactggaagttgtgatgttattatgattgattttagtccgtgtctgtcttctattatttccataagtattgacctttccctggcatccagtcctataagaaacagatcgtctaaaataagcagtgaacacttttcaatttttttcatttcagattctatagttcccttgtttttggccattttaagttgtcccataagctttgacgcatttgaatataatgtcctgattccatttttacatgcttcataacctattgctgaagcaatatagcttttacctgttccggagcttcctgtaatgaaaatattctgtccgtcttttataaaatcaagagaagcaagcctctctatctggttacggtcaaggttacgttttatggtatagtctattttctccatatatgccttatatctgaagttggcagaccttatcagccgctcaatgcttacattgcgtctgtaatcatactcactttctagaagccatttaaggaattcatcatttgtcataccatcagaggatgttgtcctgcagtcatttctgtatgtttcaagcataccgtaaaaacgtaatttggagagtaattccattattctgtccatattttttccgacagttctgtttgttttattattacttgtcatttttatctatgtttttagagttaaaataatccttacctctgagatttctgtgtttaggggtaagttccggagcctgtccttccatttggacatgatacttttcatcttccctgtttacaagaatactttcaagttcgttgaatccgaacatgcaggattccattgctatctggcatgcaaggaccattctgtcgtgtccgaaacgttccacaagacttaatataccatcagctgaacgtactgcttgagccggatattttttggctacggccacaagctttatgtactcctctactatcggatcgatttcacgtgccttgcagtatacatcatccattctgattctgtattcatgtagtactccgggaagtttatgggaaggtttttctgaatatgtgaaaggtgtatcatccctgcgatgtgtcgtaatgtgcctgaatttatgatatatctccactgtatccccatcatacagtaattctacggtatcgccgatatactctttaggaacactgtaatagtggttgttaagcgatatataactgtttttcatgacagttgccgttttccggctttttgatataaatcttgttaccggtaatgtatgcagcctgtctttctctacctcaaggaaacgctccttacggctgtggctgcggttgtacatttttcggctgttcaatgcgtccgtatgtttcattatctctatgtttaaggcttcaagatcattgattttcaatcctgtcatctttgaatatacctccctgtaaagcagtcttacggcattttcaaccaaagccttgtctttgggtttacgcacccttgccggaaagactacacatccgtaatggtctgcaaaagctgcaaagtcatcatttattacaggctctattccaccgggctttgttacggcagatttgaggttgtcgggaactatggcatttggtacacctccaaaataatggaaagcattttcacacgcctggataagatattctttcttttgtgatggtacagcctcgtaataagtaatctggctgcaaggaagtattgcagcaaaaacttctacgggaaccttatcacctgtattcctgtctgaaatatagagtttgtcaccggcaaaatccacatacatctgatctccggctatatgatcaatgcgtccaaccggtacttttacctccctttcacgtctgagatacaggcaaaatgaacaataactgtaaccttggggacggtttctcagatactcctcatacaaggaccttcttgttgttccacgggatttaagtcgtttaatgtactctggtatatgttcttgaagatacttatattctgcagatcctgttgattcgttgtcagtctccgtaccgaaaagttcatgcagatgatgctcgtccattttcaacaggcgttccagctctatacccatatcctcgtatattcggatataccgttttactgtattacgtgaaatcagaagagaagaactgatactacggatactcattcctgactggtagcaccgcagtatgtgcttgattcttattttcattctttaaaatttttattcggttaataataccgggttaaaatgctttttaaagtacaaaaacaagactgaaatgtggtaattctatagggtcaatttttattataatctaagtaggtcagtttcggttataaaggtgggtcagaagacttttataataatgggtcaatcgactttatattttccacttggttcagacttgacttttcccgtcatccggttacagaagctattttctcaaaaagcctatttctcaataactttgctctacttttccatatctcaccgattattgctacctttgttctcagaaaaacaatgtattcgtataaaaaatcatgcagcatctttattttaatcatgtagcatgtttgaaaaaaacatctcaatgattgtcttcaaacattgggaagaaaaaaagattctattagcatgattttttagaaggtaacaatgaaattatactttaataatatcgattatgaatttacgaacaactcttatcgtctttctttgcttctgtgcaaccacagttcttcgtgccgagcgtgtagatatgctgaaggccggtgcaaaagcaaatggcaagactcttaatacaaaactaatcaattcaacgattgaccgtctgaaccgtgggggcggaggtactcttttctttcctgccgggacttatctgacggggagtatccatctgaaaagtaatattacactggagttggaagccggagctaccttgctcttttctgacaactttgatgactatcttccttttgtcgaggttcgccacgaaggagtgatgatgaaaagtttccagcctttgatttatgcggtagatgccgagaatattacgatcaaaggagaaggaactttagacggacaaggaaagaaatggtggatggagttctttcgtgtcatgattgatctgaaagacaatggcatgcgtgatgtgaataaatatcagcccctatgggatgcagcaaacgatacgacagcgatttatgctgaaacgaacaaggattatgtaaatacattacaacgtcgctttttccgtcctccgttcattcagcccgttcgttgtaagaaagtaaagattgaaggagtgaaaatcataaattctcccttctggacggtcaatccggagttttgtgacaatgtaaccataaaggggatcaccatagataatgcaccctcaccaaatacggacggagtgaatccggaatcctgccgcaacgtacatatcagcgactgccatatatcagtaggagacgattgcatcacaatcaagtcgggaagagatgcgcaggcccgtcgtttgggagtaccttgcgagaatatcactatcaccaactgcaccatgctttccggtcatggaggcgttgttatcggcagcgagatgagtgggagtgtgcgtaaagttactatttccaattgcgtgtttgacggaacagatcgtggaatccgtattaagtcgacccgtggaaggggaggagtcgttgaagatattcgtgtcagcaacgtcgtaatgagcaacattaaacaggaagctgttgtattgaatttgaagtacagtaaaatgcctgccgaacctaagagtgaacgcactccgatattccgtaacgtacatatcagcggaatgactgtgacaaacgtaaagactccgatcaaaatagtgggcttggaagaagcaccgatatctgacatcgttttgcgtgatattcatattcagggagggaaacaaaaatgtatcttcgaaaattgtgaacgtatcatgatggatgacgtaatcgtcaatggtgaaaaaacaactagcataaattaaaaataaatgaaacgaatcctttttactatgcttcttgccgcatctctttcggccgaagcccagacgcaaacatacgagacagaatttgcccgtcccttgaatgaagtactgacggatatacagaaccgtttcggagtccgtttgaaatatgacattgatacggtgggaaaagtgctgccttatgccgatttccgtattcgtccttattccgtggaagagtccttgacgaatgtattggcacctttcgattataaatttgtcaagcagaaaggaaatatgtataagctgaaagcatacgagtatccacgtcgtacagatgcagatggagagaagatgttggcttatctgaatacactctatacagaccgacagtcttttcaacttcgtgccgattctctgaaaaaagaggtacgtcagcgtttaggtattgatactttgctggctcaatgtgtcaaaaccaaacctattctttcaaagatacgtaagtttgatggctataccgtgcagaatttcgcgcttgaaacacttcccggattatatgtttgcggttctatctacacgccccaatcgaaaggaaaacatgcgttgataatctgccctaacggacattttggtggcggacgttatcgggaagaccaacaacaacgtatgggaactttggcacgtatgggagctgtttgtgtagactatgatttgtttggatggggagagtcggctttgcaagttggcagtgcggcacaccgtagcagtgcggcgcacactatacaggcaatgaacggcttactgattcttgactacatgcttgcttcccgtaaggatattgacaccagccgtatcggtacgaatggcggttcgggtggaggtacccatactgtattattgagcgtattggatgatcgtttcaccgcttcagctccggtggtgagcctggcttctcacttcgacggtggctgtccctgcgaaagtggaatgcctattcaactatctgcaggaggaacctgtaatgtggaattagccgctacttttgctcctcgtccacaactgatcgtatcggatggcggcgactggacggccagtgttcctactcttgaatttccttatctgcaacgaatctatggattctaccaggcaaaagataaagtaacgaatgtacatcttcccaaagagaaacatgactttggtccgaataagcggaatgctgtttatgacttcttcgcagaagtattcaaattggataaaaagatgttggatgaaagcaaggtcaccattgaaccggaatccgctatgtatagttttggtgaaaaaggagctttgcttcctgaaggcgccatccgttcttttgacaaggtagctgcttattttgacaagaaggcttttgctaatttaaaatcagatgcttctctcgaaaagaaagccattgactgggtagcttctttagagttgaacgatgataaaaaggcaggttttgcagtaactgccatttataatcatcttcgaaaagtgcgtgactggcataatgagcacccttatacaacaatccccgagggtatcaatcctctgacaggcaaaccactttccaagctcgaccgtgaaatgattgcagattccgctatgccgaaagaagtacatgaaaggctaatgaaagatttacgcagagtattgacggaagaacagattgaacaaatcctggataaatacacggtaggtaaagttgcttttaccttgaaaggttatcaggccattgtgcccaatatgacagaggaggaaacagctttcgttctggaacagttgaaactggctcgcgaacaagctattgactacaagaatatgaagcagatttctgctatcttcgaaatttataaaaccaaatgcgaacagtatttcaatgagcatggtcgcaactggcgtcagatgttcaaagagtatgtgaataagcgaaacgcagaaaagaaggctcaaggaaagaaataaatgaaggtatacccttaaccttctgcataaccggaatatctccgggataatagaagaatataatagagctatgctttgcaactgacaaagcatagctttatcatatctaaagctatgctttagttcccctaaaacactgctataatttatttcttcacgattactaaacatctttttcgcagaaaatgtgttattttgtagatggctaacagaaatgtatatgatatggataagcaaaaagtagcattagtcctttccatggggggagcacgtggaatagcacatataggagtaattgaagaattacttcgtcacaactttgagattacttccattgcaggaagttccatgggagcaatggtgggagcaatgtatgcttcaggaaaaatggaagaatgtaaagaatggctgtatagttgggacaaacgcaagatgtgggaattggcggatcttaccttaagccgggatggattagtgaaaggtgaccgttttattaaagaactgaaacaaattattccggacatgaatatcgaagacctgcctgtcccttatgtagcgatggctacggatattgtccgcgatcaggaagtcaggtttgacagagggagcttacatgaagctatccgtgcgtctatttctatccctatgcttttccgtccattaagaaaagacggtatggtattgattgatggaggtattctgaatcctcttccattgagtcatgtgcaacgcactgaaggagacattctgatagctgtcgatgtgaatgcacccattgataccggaaagaaaaagaaaatatctccttataatctgttgacagaatcttccaggatgatgatgcagcaaatcacccgttatcagatagaacgttgtcagccggatatcctaattcagatttctggcgatacgtatgatatgttggagttccatcatgctgcttcgatagtgaagacaggagtggaagtcacccgaagcgtgttgaaagagtctcatggcgattaatgatataatgaagacatatcattgtatctgataaattctcaaattactccagataaatcatctttttcgtcattcctccgtcaatcgtgatattttctccattgatgaaatcattgttttcttcacagagaaacaaacacatacgggcaatatcttccggtttgcctacccgtcgcgaaggatgttgtgaatgatcttccggctggagttggtcataatcatgagtttgtatccatcccggagcaatagagttgacggtgatattccattcggataacgataaagccagtgcatgagttaaagaatagataccgcctttagaagctgcgtaaccttcacttcctggttcactcatcaagtaacgtgtggagcagatattgataatccgaccgtatgggttaggagaggactgttctttacgatgtatggcaagcaggcgggaggtgataaatacaggacgtaggttgatagaaagtattttgtcgaaatcctctacgcttgtttcggtgatagacgaaaattgactgataccgacgttgttgacaataatatcaatatcattccattcggaaagaatacgttgtatacaactttcaagtgcatccttatcgctgacatcgactttatggaatatagatccggttgcttttgcagtctcttgtcccgctgtttcgtttatatcacaaaaagcgacttgatcgccggacaggcaaaaagcttctactattgccttgcctataccttccgctcctcctgttataaatactcttttgggggaggtctctggttttgaggccattggagtacacgaagccgatttgaccggatgaacggttgtagatttcttcttaccatatttctgtgcttgtttccaagcagcctttctggcttcatatagctcttgctgtttttctatatagttgtctgccatcgttctttttatttattgcaaatgtaaaacataaaacggataaaaacaaagaatcgactgttcgattgaataagaacaaccgctcgtctgcggagaaaggaccgtaggattatgacaaatcgaccgctcattcctatccgaatgagcggtcgatttatgtaaaatgactattcgatttttagaacttcagcggatctatctcggcatattttatccgttgacgacgccaagtgtaaatggcatgcagctttccatctttaccttcaataatgctaggataagaatattgactgatcgggctatcctccaatgtgagaacaggcttccagctgattccatcctccgatatagctacacaaagcggtgtacgaggccctttcggagttccgggcaatgtagagaaattattataaataagcacatgcctgccatctttcattgtcacggcgtctgtaccggaattattattcggaacatccagcagcgttactttgctccacgtatcaccattgtcactgctccaggctgttgcaatctgtgcattgcgcgtacggcagagtatctgcaattttccgtccttatgctttaaaatactaggttgtatcgcataaataggtttagcgcctttccctttgatggcttccccgccttcctgatcatccgtatttattcctccttttttacggttctgagtcggtacggatagttctgcttccaaaggtcctaccattttccaggtttttcctttatcatcagaaatctcgaaatgaacacgccagcccttactcccttccgtactggaaggacagatgatacgaccgtcgatatattccggcttattcttgataggacctagaaaacctttaggaagaggttcacgcttgctccaggtctttcctccgtcacgcgaacgaaccaaccatcctgtccagtcactcactttcagacctattttgtagaagagaatcaaatctccgcccggaacttgaaacagtaccggattccaacacgctttccgacgtgcgacgagtttcccttttgcatcttttaccggtgtacaggtggagtcgattcccgctaatatagcttgcggatctttgagtgaaaacacaccatctgcagcaagtttgggagcactccactctttggcgcctttcggcttacggcatacccaaatacaacaatcgggattgcgttctttcgttcctccaaagaaagaggcgacaagatctccgttcttcatctctacaatagtagctccgtgacattcggggaaagcggccttttcgtacagaaattcatcacttagaatggctgtgttcttagtcggtatatctacactaaaatgatgttttcccgaaccgatcttctcttttcgaccatctggcaaatgtacttcgcctgttgtattggcaggcaattcaatatcccattccagatgcatgggcgttttcttccatcggctggttatttttccatagatactcatataagatgcatctacattgcttaactcttgaatctcaaaagtcggctggaaaataatatgtttgtaaccagacttccaacggtctgcacggatacctgccagattattgaaacaccaaggcaataaatctcctaaaagcatgacatggttgccactgttcatttctggatttgccgtatcaccattccataattcccaaatggtggtagcaccttttccaaccatatacccccacgaaggatacgttttgttggtagccagcaagtaagccacatcggcataaccacgacggcttaattcacgcaacagccattgcacaccaatgactccggtgctgatatgtcccttattggtggtaataatggaagttacggcatttttggcaacctcatggatgtaattctttggcactaacccgaaagcaagtggcagaatattggcagtgaccgtattattaccatagtagatactgtccggatataatgtatgtcccggcacatgggatgttccctcttttatatgcaagaagcgggcattgaatgcgtctttcatacgatgttccagttcttcccattcttctgcatcggctttcagtccttgcaggctggcaaaacgatgcatcagttgcaacactttcaaataataggcagtggcgatcagcgcaccgtcagtcttgcgggaaggatccttactgtgaatcagttccaaagattcgggaggaacacaccagtcaccatatttatctttagttatgatatattcctttgtcatatagtattcacggatatgagccacccattttttgatagccggataattctcctctatcggacgtttatctccgaaattggtaaaaagcatatcacaagccataggcaacgccgcgggccaagtcacattgtccgagtaatagttccaataggccggagcgacatcgggaatacaaccgtcttcacgttgtgcttcgcggatatcacgtgtccatttggtatacattgcataattatcgaaaagcatactctctccccaacatcccatggtgcggtcgcccaaccaaggctgacgttcattccgttgcggacagtctaccggcatacctttataattactccggattccccaaaacgcattacggacaatcttattcaatgtctcgtcagagcaactgaaagatcctgtatgcgtcatctcgtcttccacgacttcagctacgaagtctccaagttgcgcatccggataattgctgacctccacataacggaagccatgatacacgaaacgaggtgcccacgtagtgtccttcacttcgcgtccgcttacgatatacgtatctgtggaacgggcgtcacgtagattccgagtatagagttccccattggcctgcaaggtttctgcgaaacggagacgaatactgtcaccggcttgtcctttaatgcggaaccgcacccaaccagccatattctgaccaaaatcaaggatgtacttatcaccaagtttttggatggaaacaggttttaatgtatccattactttcatacccggcattatttgggcacgcaatgttcctgaaggaatactgactctttgtgccgctatccagcttttgtcgtcataaccgctttgtgtccagttgcccaattccttgcgggcatcatattcttcgccgtcatattcgttattgctacggatagcaccttcggttgtcagtttccatgaagtgtttgtagcaatcgtttctttactgccatccatatattccacaatcagattcaggcggagtttgggatagccgaatgtcggtatcttgtacggtttgtaattctggcgcatcgtatagaaacgtccgttgcccaatgtcacaccaatagcattctcttttcgaagttgtggcgtcacatcgtaagtgttgtacagaattgttttccgatagtcggtaggagcgggggccaacacttgatcgccaatacgctgtccgttaataaataattcataaagtcccattccagcaatgtgtaccgttgcacgtttcacctctttgctcaacgcaaattctttgcggagataacgggctgccaagcggctccattgggtttcactgtcaccggaagcggcacggtccaatccaatccactggccttgccagtccgcttcattcagcaatcccatactccaaaaggccggagcactccagtccgcttcccctctattagtatagaccttcactttccaataatagcgggcattacgctttagcggtttaccttgataagcaatccattgggaggcgtcggactctatctttcctgaatcccaaatatctccttttccttgcgccagcaagtcggcagaagaagcaacaagaatgtgatacgctgtttgcatcacattctgttcatccgattcgatgtgccaacccaatcggggctggcgcacgtcaatacctagcggattctttaattgctccgttcgcagttcggttatgcctatggctgcatagactgaacctgctaaaaacagaaacgcaaagaatgctactataaatattctcttattcatcatttatcgctgatatatttcagttgggcatcgggaagttccgtccatgtcttaccgaggtagtttttattgctgtccaccacaatcagaatatgatcgtttccactgcagtaaccgctatcgtgctggaaggtatgcacaccgttattaaattcaccgatatattccagcttaccgtcctttgtcgtataccaccaggcattcttctttgccccgctaatcttgctgaaatcaacttccatcggacgtccggtataattatacaccatcagataatcattaccgcgtgtagcgatggcacggtcgtaacgttctccgttcttacctgcgatgacagactgatccggtatacgttcgaagaacgggaaagtcagcatcaggtttttcaaatatttcatttgattataaccgggatcattcaatgcttcataccaaggcttcttggctccgtatgcaccacccacacccggtttgataaactgcataatggaattatgcccatacgtatgcccgaaagaaccggtgaatacagaccaataagcatagcggcgtacatcgtaatctttccataacaactcgttctcgtcatgcaggccatgaggaatttcttcatagataggttctccatcgataaccggtttcatgggtttcatagccatactgcgctcaacgaaacgccagttgtcttcttccgtattctcttcgataggatagtcgccgtcaccaaaacgttgtccgtaacgacggtgtccgctttgaaacatattgaagtccagccaggaagcgttgttgaaccaagttgctgaggttgttctgccacgcggatggaaggtcatcaggtgattcttgtcgattgctttgatagaagttgccaatgcctcccattcggctgttttcacatcaccgcgaatgtctccaccgataaaccaaatgatattcggttcgtccttataacgttccgccaggaactttccgtatgctttcgcctgttcgacagtcatttctccacgattcacgggacttccccagatacaaaccataccgatatacagtcctttttttgcagccgtacgaatgatataatccatgtgatcccaataaccatatacacctttccggtcgatgttcttgaagttatatccatctatcatggaatattgtccgtagatattcatggatggcacattattcaaggtctgaacttgaattacattgtatccgcgatgtttgcactgttccagataatattcggcttcgtcacgattcagacgctctgggagcaaccatcctgtttcccccaaccagaagaaaggagtaccgttttcgtgtttcaaataacgcccctcttcggagacaacaagtttaccgttgctccagggaatatacgttttctgtgttttcttttgtgccgccactgaagtactcaagctcagcagtaacagtaaaaaaggaagaatcttgaattttttcattgtttttttatcgtttttagtttattccagttcaccacagattatttctcaatcattttttcaaattcaattgcagccaggataaatgctcctactgacttcggatcattctcgataatcggttcgctgatataatactcaaatgaaccgtcacggtatcttttagagtctccgcccagtccggctacggcacaacaattggtgatagtataacttccgtcttcctccaaaagggtgaaatttccggtcatgccgttgaaagcttttcttaccggttcgatatattcatttccgatatatcctttgttaatggctttggcgagcgtataaacaaacaaagcggttgccgaagactctaggtaattacctttacgtgcaccttgatctgtcacttgataccatgtgccggattgagggtcctgatattttacaatcgcttcggccagcctttgaagaatctgtatgacgctgtcccgtcctgctgtttcttgtggcagataatccagaacatccactatcgcagcaccataccatccgatactgcggctccagaaattcggagaacacccggtttcgggatttgcccatttctgttcacggctttcatcccatccgtgatagtaaagaccggtagccggatcatacgttttacgggcaatcaaaagtatttgcttcaccgcttcgtcaaacaaagccggttcctggaaagtcgcaccatattgtaccagatagggagaagccataaagataccgtccaaccacatctgatgggtatatttcaatttgtgccagaagcctccttcgctggtacgcggctgttcggtcatctgcttacgaagcgtatccatagccgttttgtaacgttcatctcccgtctttgcgtagaggtcgaacaaaatcttaccgccatttacattgtcgatattgaaagaaagatatttcatggtctttatacgtccgtcagtgtcaatcagactatccgcataaatcttggcatactcgtaatatgtactgtcgcccgtatgtttccatgcttcgagcattgattttaccacaaggccgtgcgtatatccccatcgtggttttttagctttttcaatcatccagggctctgggaaacgtttcatttcggaacgtgccatgcgttcactccacttttcggtttctgctttcttggtagtcgtacaagcaataaagcagacaattccgcaggcaataatcgccttaaataaattttgattcatatagttgagtttttattttccgatcaggatatattcttttcccgcttttgtgggcaggtcatacaaataggtttccgtcagctctattttattcaattttgctttcccgttaatcaatggtttggtaatagcggggacggcaaagagaggattcgggttctcgcctttggcaggtttcagtcctttaccttttagcgggttgagtgagcggagacgacagtttcctcctttgtgggattttactatcagatgatttacttttccgtctttccaactcaagtcaagctcaaaaccaccacgtgcgataatacctttcaccgaaccttccttccacaaagtaggaagggcgggaagtaaatagatgaatccgtcataactctgcatcagcatttctacgattcctgccgtacaaccgaagttcccgtcaatctgaaagggtggatgtgcatcgaacaaattaggataagtaccaccttttttcttttcgttgcgtacaagagtcaactgatctgttatcagcttataagcatggtcaccatcaagcagacgcgcccaaagacaaactttccatcccatactccagccggtagacggatccccgcgatggatgagcgaggtgcgtgccgcatcaaacaattccggtgtgcggtatggggaaatctgattgctggggaacaatccgtaaagatgggagacatgacgatgtacgtcgttcggatcatcccaatcgaacatccattcttgcaattgtccccaatgacctatttgcataggaggcatttctttcaagcgttgctttagatgagttgcgaaatctttgtcggtatccagaatttcggaagctgaaataatagccgtccaaagatcgaaaatcaactgattatccatcgtacatccggcggctgtcgttgcctttccgttactgcccgaatgtacattctccggtgaattgctaggacaaaccaccaaccagttgtgtatcggttcctttaccatgatttcatcgaagaaacggccggactctttcagtataggatagatggaacgcagaaaatcggtatctccggtatataaataacgttcccataaatgacggcagagccacgctccaccactaggccacatgcccgaaggagctttgtcaattgctcctgtgacgcgccagatatctgtgttgtgatggagtacccagccattcgctccatacatgattttagccgtttccttgcctgtctcgctgacctcctttatcagccggaaaagaggctcgttcagctcgctaagattggtaacttcagacggccaatagttcatctccaagttgatgttgcaagtgtatttgctgtcccaagaaggaaataatttatcattccagataccttgcaagttagcgggttgtccgccgggttgtgaagaacaaatcaataggtaacgcccgaactggaagtaagtagctaccaaatgagcatcatttgtatctttgaagttttctacacgtttatcggttgtgatgttttcatatcggtttttacctaagttcaaagatactctggtcaagtatcggcgatagaaatcagtatgatttttcttggcttccggaaacggatgtttcattgctttggaaagatagtctttagcccgttctatctgatttcctgtgatatccagataattattgaaattggtggctattgacacgtaaatgatagcttcatcagctccttctaccgatagaattccatctgcacatgctatttttccacctctattccgtgcagtcaaccgtccttgaaattccactttccctttgagaccttcatgccaggaagagacaccggaaagcgtaacgcaatttccttcctcagaggaaatcattacatcctgatgaggagaggtcagttgggcattaaaggttatttgtcccggacagctggctgtcagtctgaccattaccacttgatcggtaaatgaggtaatcgtttcgcgttggtattgtactccgtctacctcatatcgcacgatggcgcgggcggaatccagacttagctcccgatagtagtccgaataacgggtatgtccgggaaaagcgattcgcaagtccccgaaactttgataaggcattcccgagtttgtcttagccatcaccttctcggtagcaagagtttgcgctttgagatattttcctgcaaagaccagttcacgcactttgggaatatactcaagtgcgttcggattggcgttgttgttagggcgtcctgcccagatagtttcttcgtttagttgtatttgttctgtacccggtattccatataccatagctcccaaacggccattgcccaaaggcagggcttccgtccatacctgtgcgggacggtcataccataacttatattcttgcgtagaagcgttcgtttcttgtgcatgaatagaagttacagacagcatgacgagcacatatccgatcaatctctttttattcattatcatctaacgtcttttatacttttataaaaggacggttgaacggactttttgtacccaataagtcgctaaaagaatataattactcggacattatttttatcttttcaatcggctgctgcctgacagtatccattggaacagcccgataatgcactttggaaaaatcaatagagcgcaaatcaatgctgcggatcgtactgttgtacatcgttcggaaatagataatccggttattcatatccgttactgatgtccattgcgtggcacttggaacgattgttttttccataaacaaattacttgataataagtttgaaaggagactgtcatatcctctgtattttcttgtcatttgaaatatactttcctatatttgtcagtaaaatcattaatcatttccgttgcgaacggaaatgttagcacaaaccgttactccaagtaagaagtacatcacaagggaagtaaagaatgtgagcaatatttttttaatttgaagaaaaaagaagaaaagaacaatatggaaactataaagattacacgatatcaatcgcctgtaggcgagatgcttgtcggttcttacggagataagctgtgtatttgcgactgggcggtgaagaaacggcgaggtacgatagaccgccgcatacagcgacatctgaatgcgaagtacgaagaggggacttccgacatcatcgaacgggcaatcggggaactcgaagaatactttgccggacaccgtaagatattcgacattcctgttgtctttaccggctctgaatttcagtgcactgtatgggaagaactgatgaaaataccctatggaacgaccatatcttatggcgagcttgcccgccgcatccataacccgaaggctgtgcgtgcagttgcatcggccaatgccaccaatcctatctctatctttgttccctgccatcgggtaatcggcagcaatcataaacttacggggtacggaggtggtctcgatgcgaaaaaaggattattggagttggaatgttctaaaacgatggggctcggtttatggtagatttaatatacaaaatcacgaaaagtgtcattcacgcgaaacgaggggtggcactttttattatttttcagtgaaataaatggctatatgcctgtatttggacttgcagggcgtaccgaaataggggcttcgtttttttgttttattgagtacaaaatacggataattgcgtctttttataaagatattgtgtaaattttaaattatccatattaatgaaacagataaaactgttacttcttttagcttccgcctccgttacgggagcacttgcgcaaagcaatggattgacggatatgagtcagagccgttttgcgaagatggcgaataccggaatcggtgccgtacattggacaaacggattttggggagaccgttttaatgtgtttagccggacttccctgcaaagtatgtggaacacttggaacacgccggagatctctcacggtttccgtaattttgagattgctgccggagtatgcaaaggagagcattggggacctccattccatgacggagatatgtataagtggatggaaggagtggcttctgtctatgcagttaataaagatccggagttggacaagttaatggataactttattacttgtgttgtaaaagcccaacgtgcagacggttatatacatacgcctgttattatcgaagaactgaataaagggattgattcccatacaacagcattgggtgatcagtataaacagacggtcattgggacgaaagtaggtgatgagaatgaaaaaggagcttttgccaatcggctgaactttgagacttataatctgggacacttgatgatggcgggtatcgtgcatcgtcgtgctaccggaaagactactcttttcgatgctgctgtgaaagcaacggatttcctctgtcatttttatgaaacggcttctgccgaactggctcgcaatgctatttgtccctctcattatatgggggtagtcgaaatgtaccgggctaccggaaatccccgttatctggaactttcaaagaatctgattgatatccgtggtatggtagagaacggtacggacgataatcaagaccgtattcctttccgcgatcaatatcgtgcgatgggacatgcggtacgtgccaactatctgtatgccggagtagcggatgtatatgcagaaaccggtgagcagcaattaatgaagaacctgactagtatctggaatgatatcgtgacccggaaaatgtacgtgaccggtgcttgcggcgctctttatgatggtacatcgcctgatggaacgtgttatgagccggatagtattcagaaagtgcatcagagttatggacgtccctatcagttgccgaatagtactgctcacaatgaaacgtgtgccaatatcggtaatatgttgttcaactggcggatgctagaagtgacaggggatgcgaaatatgccgatcttgtggagacttgtctttataatagtgtattgagcggtattagtctggatggaaagaagtatttctacacgaatccgcttcgtatcagtgccgatcttccttacacgcttcgctggccgaaggaacggacagaatatatcagttgtttctgctgtcctccgaacacattgcgtacgctgtgtcaggcacaaaactatgcatatacattgagcccggaagggatttattgcaatttgtatggggcaaatacattgacaacgacttggaaagagaagggagaagtagctctgacgcaggaaacggattatccttgggatggaaatatacgtgtaacgttggataaagttcctcgtaaggcaggtactttctcgctcttcttacgcatccctgaatggtgtgaaaaggctacgcttagggtgaatggacagccgttgcaagtcaatgcgaaggcaaattcgtatgcggaagtaaatcgtgcatggaagaagggggatgtagtggagttagtgatggatatgcctgtgcgtttgctcgaagctcatccgttggcagaggagattcgtaatcaggtggtcgtgaagcgcggaccgttggtttattgcctggaaagtatggatattgcaaacggggaaaagattgataatgtattgattcctgctgatataaaattgactccgaagaaaatcacgattgagggtagtccgattgtagcgctcgaaggtaaagcgcgtctggcacctgcaatttcttgggaaggagtactttatcgtccggtggttcagacagagaaaacggtggatattcgtttgattccttattatgcctggggaaatagaggaaaaggagagatgaccgtatggatgcctcttgtcagataatcatgatacagaaatgaagaaatcaggaggaaaaataaagaaatgaggatgagaaagttatttttaacggctatatgtattttgtgtaatcattggttatggtccggtgagatatgggtttctcccaaaggtaatgactttaatgatggaacccgccagtctcccaaagcaacgctgactgctgctttacggcaggcacgtgaatggcggaggacgggagatgaccgtatgcagggaggaatcactgtttatatggaagggggaacgtacgctctgtatgagccggtttttattcgtccggaagatagtgggacaaaggaatccccgactgtgatccgttcggcagccgatgaaaaggtggtgttgagtgggggagtccgtatcaagaattggaagaaacaaggaaagctctgggtggcagatgtgccgacatttaatgggcgtccattggatttccgtcagttgtgggtgaatggagaaaaggctgtccgtgcccgtgatgtagaggatttcgaaaagatgaaccgtatttgcagcgtggatgaaaataatgaagttctttatgttcctgcggttgcggtacgcagacttattgataataagagaaaaatgaaggctgaatatgccgagatggtactccatcagatgtggtgtgtggctaatcttcggattcggtctattgaagtgcagggagatagtgcggcggtacgttttcaccagccggaaagccggattcagtttgaacatccttggccgcgtccaatgatgacgacggacggacataattccgctttctatctgacgaatgcccgtgagctattggatgtaccgggcgaatggtatcatgatatagatgaccgtaaagtatattattatccacgggaaggagagaagatgcaggaggcggaagtgatggtacctgccattgagacgttagtacaggtagaaggtactttggatcgtcctgtgtgccatattcgttttgagaaaattactttttcttatactatgtggatgcgtccgtcagagaaaggacatgtgcctcttcaggcaggcatgtatctgacggatgggtaccggattgatccgaagatgcaacgggattatctgaatcatccgttggataatcaaggatggttgggacgtcctgcggctgctgtccggatagctgctgccaaacagattgattttgagcgttgccgatttgaacatctgggttctaccggattggattatgaagaagcggtgcaggatggtattgttcgtggctgtctctttcgcgatattgcaggaaatggtttgctgaccggtagtttttctccggctgctcacgaaacacatttgccatacgatcctgctgaccgccgggaggtatgtacacaccagcaaatcaataattgctatttcacggaagtaggtaatgaggactggggatgtctcgccattgctgcgggatatgtgagtgatattaatatcgagcataatgaaatcagtgaagttccttatagtggcatcagtcttggttggggatggacacaaactgtgaattgtatgcgtaataacagagttcatgcaaatctgattcatcattatgcgaaacatatgtatgatgtagcgggtatttacacgctcggttcacagcccaaaagctatgtaacggaaaattgtgtgcatagtatctataagccggggtatgtgcacgatcctaatcactggttctacctttatacagatgagggttcttcttttattactgttcgtgataattggacggaaggggagaagtatctgcaaaatgccaatggcccgggaaatgtatgggagaacaatggcccgaaagtggatagtgttattcgtgaacgtgcgggactggaagcaggatataaggatttactaaatatccagtaggtattgacaagtcatttaactgtaatacatgattcgttccacagatatggaactaaaggaaaacaattgtagaactaaagggaaacagatgtggaactaaacgtcaaccactgtggaacgaattatttcttacgattcagtttgttagtaatagaaagaaaaatgaaaaagaaatatatgatattgcttagtgccttgtctttggcaagcagcacatttgcccagacttggatatggtatccgggagactacgaaatctggttgggaaatcaaatgaataaccgtcgtacggaacgaggtgcattttttcctcctttttggaaaacggacagtcattatgttgtcgtagaattcagcaagcaactgaatctttccgagccggaagaaatctttattgctgccgaaggaaagtacaacgtcaaactggatggaaagctccagttcggtatgccggaaaccatgttgcttccggccggaaaacataatctgaacatcaaagtctggaatcaggcaactcctcccactatttatgtgaagggaaaaacagtgaattcagactcttcctggcgtgtgacttacgaagataaagaatggattgacgaaagcggaaaagccagtgacacatctgccactatctatatggatgccggatgctggaactttgacggagctacccaacgtccttccctattcagtctgatgcgtgaaccgcagcaacctgttacgaagtcagaacagtccgaaggaggtattctttatgattttggaaaagaaacattcggattcatcacattgaaaaatctttccggaaaaggaaaaatagaaatttattatggtgaaagcccggaagaagcaaaagataaagcatattgtgaaactttggacaaactgttgttagagccgggacaaatgactaacctcgccatccgcagcacttctcccttaaatagttctgataacgaatatacgttggagaacagtaaagcttttcgatatgtctacgttacccacgaaccgggtgtacaaataggagaagtatccatgcaatatgaatatcttcctgaagagtatcgtggaagtttccgttgcaatgatgaagaattgaaccgtatttgggaagtgggggcctataccatgcatctcactacccgcgagttctttattgacggtatcaaacgcgaccgctgggtatggagtggtgatgctattcaaagttatctgatgaattattatcttttcttcgatagtgaatccgtgaaacgtacaatctggctgcttcgtggcaaagatcctgtgaccagccatagcaatacgattatggactatactttctattggtttcttagtgtatatgattattatatgtatagtggcgaccgccactttgtcaaccaactgtatccacgtatgcaaacgatgatggattatgtattgggacgtacaaataaaaatggcatggtggaaggtatgaccggtgactgggtatttgtggactgggcggacggctatctggataaaaaaggagaactttcttttgagcaaatcttattttgcagaagtctggaaacgatggctttgtgtgcagaattggttggagacactaatagcaaacaaaaatacgaaaaattagctgtcgctttgaaagcaaaactagaacccaccttctggaataaccagaaacaggcatttgtacataactgtgtcaacggtcagcaaagtgatgcagtcacccgctatgcaaatatgttttctgtattctttcaatatttgaacgcagataagcagcaagccatcaagaactctgttcttctgaatgacagtattctgaaaataacaactccctatatgcgtttttacgaactggaagcactttgtgctcttggcgaacaggatgctgtaatgaaagaaatgaaagcctattggggaggaatgttgaaggaaggtgctacctccttctgggaaaaatataacccggaagaaatcggaacgcaacatcttgccatgtatggccgtccttatggcaagagtttgtgccatgcctggggagcgagtcctatctacctgttgggcaaatattatctgggagtgaaacctgtaaaagaaggatataaagagtttgctattactcctgtgttgggaggattgaaatggatggaaggcactatccccactccaaatggcaatatccatgtctatatgaacagcaaaacgatgaaagtgaaagcaacagaagggaaaggctatctaaccatcaaaagccgtcgtccacctaaagcaaatatcggaacaccggaaaaagtgtcggaaggagtatggcggctctggattgattcacccgaagaaagaattgttacctatcatttataatacattgttaattagttagtggagtagtccttgattaacggttcctctttttaatgggggattgttaatcggggactttttttattggaatatgcatcaccttttctaaattttactacttttgttttgtgaaagacacttaattgtaatacgccttttgttcttttggaaaaacaattaaacaaaatccaaggaatgttagataaatcagctcaatacactaatacagatgacgagaagctcttttccttcatagaaaaaggagataaaggagcttttacacaagcttatgacagatatcataagctgctatatgtattagcttaccgttatttaatgaatgcagacatggcagaagatgtagtacaacatgtctttgctcgtttatgggaatttaggtcggaactacatgtaggaatcagccttaaaaactatctgttcactatgacgaaaaatcatgtcttaaatctgattcgtaatgagaatagtgcaatcagcaagaactatgagatagcacaatcgacacctgtctacgaagataatctgatagaaaatctggagaagaaagaattgatggcctctttttataaagcggtagatatgcttccgccacaaaaacgtagtatttgtttgatgaaagtgaaagaggaactaacgaatcaggaaatagccgaacggatgaatctgtctgttaatacagtcaaaacacattatacggaagcattgaaaatgctacgtattcatttaagtaaaatgctaataattgttacttttgtcacactaatgacatatttaagtgtccactatttaagataaaaagagaatgaatcgacccactgataaacaaatagaagaagtgcttgccggagttgctacaccggaggatgcaaaatttgtggcggaatggtttgccacagaagaagggaacacttacctggatgctgtgatgactcgggaggcagaacatttaaaagccgaaacggcagaaatatatgtggaccatactataccttcagaaaagatgtaccatcagatccaaaagaacatatcacgcaaacagatcaaacgtatctgcttccgtgtggctgcaatcttgattcccgttattttcctgataggtctttatttacagatcaattcccgggtggatttattcggcactacggaatatgaggaaattcgtgttgccaaaggagagcggatacagatgatgtttcaagacgggacacgagtttatatcaattcggattcctggttgaagtatcctaaaaagttcggattgagtaagcgggaagttttcctggtgggagaagcctatttcgtggtagccaagaataaaaaacgtccgtttattgttaatctgaacggaccttccgttcatgtactaggtacttcttttgatgtacaagcctacccggaaaataaagacattgtgatctgtctggatgaaggacatgtaaacctgactctctcctctgcaaaagaatacccgttactgccgggcgagaaactgatatataataaagaaagtgaccagtgccggataatcaagaacgatcattcaaagcaagtctcaatgtggaaagacaatgtgatttcttttaaagatactcctctggcagaagtggtcaaggttctgaaccgctggtataatgtaaactttaagatagaggatgagcaagcatcgaaatatgtatatacgttgacctcggataatacgatactggagaaagtgcttcaggatttggaaaagattgcaccggtaaaatttgaatatgatgaagtccggaaagaagtgacagtccgaatgaaacaggacggaaagaagtaaaatatactggataggataatagaatgaggacaggctgtgtatatacgcagcctttactgttttagaataagaatgttatgaaataaattaggcttatgcaaaaaaactcttttttctctcacccgcttttttgacttgtgtgtctactaagcataaatgagattttaaatctaagtttaactttaatcaaagcaagtagtatgaaacacaaagttctgctcgtattgttgctggggataatcataagcgtttccgcttctgcccaaaaggtgacaatgaatcttaaacaagtaaagctggagaaagtattctctgctattacacagcaaactggtcttacggtggcttatagccgtacgatcgtcaatccggatcgaatagtgacggtagaagcaaagaatcaggaactatctaaagttctgaatgatttgtttctcggtactaacgtaaactatgagatcggaaaaacaaaaatttatttgaaggagaaagttacggattctgaacaacaaaccagtaatgcgaacaaaaaaaatatatccggtcgggtagtcgatgagaaaggagagccgattattggcgccagtgtgatggtgcaaggcagctctttgggtacaataacgaatgtagacggacgttatactttggctaatgttcccgaaaacagtacgattacagtatcatacatcggatatattacggttaattacgctgctaccagcagaaatctgtcccaagtagttctccgcgaagatagtaagacactggaagaagtggtagtggtgggatatggtacgcaaaagaaagtaaacctgactggtgctgttgctatcgtttcgggtgatgaactgacgacccgttctgctgccaacttatcacagcttctgcaaggttccgtaccgaatatgaacgtaaactttagttcgggacgtcccggacaagggggaagcttcaatatccgtggagtcaactccattagtgcggacgcggcacctctgactatcattgatgggattgagggagatataaataaggtaaaccccaatgacgtagaatccatcagtgttttaaaggatgcttcggctgctgccgtatatggtgcccgtgctgcatatggagttattttggttacaaccaagaatggaaaggtcggcaagaccaatgtcagctacaacggtcgttttagttttggtgaaacgacaacttctacggattttgagacacgtggttattattcggccggtattaatgatatgttctacaaaacataccagggcgtcccttatacacattatacccaagaagattaccatgaattatggattcgccgtaatgataaagtggaagatccttcccgtccatgggtggtagaaaaaaacggagagtataaatattacggcaactttgactggtataattgtttgtttgataatacccgtcccacttgggagcataacttgacggtttcgggaggaaccgaaaaagtgaagtacatgctatcaggcaactactataatcagaaaggaattatcagaatagatccggaccgttttaagaaatatacgttccgttcgaaaatcattgccaatatcacttcctggtttgaattaagtaacaatacttcctattaccattctgaatatacctatccgggactatcgggagtgaatgacgttttcaccagagccgggcggcatgctttggcaagtattgtgccgatgcatccggatggaactctggtttacagaacaggtctgacagatacaggagaagtggcagatggtgttagtgccgtattattgaatggcggccaccataaccgggatcgtgaatatgagtttgtaactacgttcgaggccgtattgaaacccatcaaacattttgaggttcgtgcaaactacagctgggcgcattacaaccagcagaatttgaatcgttccgtagatgtattatactccagaaatccgggagaaacaatcacaatggataacggacgtaccagaggcaattatttgtcggaaatacaaaacaaccagatacgccaaactttcaacttatacgggacgtatgacaataccttcgcaaatgcacattctgtaaaggtcattgtgggaggtaactatgattataagtatttcaagaaactgggaatgaaacgtaacgggttactctctgaatctctcgatgattttaacctggcaaaaggtgatgatatatccataaccggaggacaagaggaatatgcgattcttggttttttctatcgtttgaattatggatataaagaccgctatctatttgaagccagcggacgttatgacggtagttcccgttttcgtcgaggacatcgtttcggtttcttcccgtcgttctctgccggatggcgtgtcagtgaagaagccttctttacacaagccaaaaactatgtaagtaatctgaaactaagactgtcttacggatcattgggaaatcagaaaacagtaggctattatgactatctgcaactgattaataccggagcggtaatgaactatgctttcggagatactacgaaaggcgattatgcctatgagtcagctccgaactctaccgatttgacctgggaaactgtaatcacaaaaaatataggtttggacttgggttttcttaataatcgtttgaatgtatcttttgatgcatatattcgtgataccaaagatatgttgatggcaggaaagactttgcctggcgtatatggtgcctcttctcccagaatgaatgtggcagacttgcgtacgaaagggtgggaagcatctattacttggggagatagttttactttggcaagcaagcctttcaactaccggataatggctggtatcggagataacacctccaaagtgacaaaatatgataatcccaaccggacgctgactgatccttacgaaggacagcagttgggcgaaatatggggatacgtagtagacggttattttaaaacggatgaagaagcaaggaattataaagtggaccaatcgttcgttaaccaaatgattaatgcaagcgctttggataatggacttcatgccggtgacctcaaatttgtcgatttggatggtaacaacaagattgagcagacaacatcggctaatgaccggaaagacatgaaagtgatcggtaactcattgccgcgctataattataatttcggaatctctgcagattggtatggaattgatttttcagttctttttcagggcattggcaaacaaaattggtatcctggtgctgaaacgtccatgttttggggaccttattcccgaccatacgctagttttattccttccgactttatgagccaggtatggagtgaagaaaatacagatgcttatttcccacgtcccagaggatatgtggctcttggaagtaatcgtgaattagcagtggtcaatactaagtatttgcagaacctcgcttattgtcggttgaagaatctttctattggttacacattgccggataaatggctttctaaaataggtttcgagaaaatacgtgtttactttagtggtgagaacttgctgacatttactaagctacattccgattatattgatccggaacaagcatcggcaagtaacagctggaaaacaagtaaaagtgacgcaaatatttatccctgggcaaagacctactcttttggtatagatataacgttttgataataacgaatataaagaagatatagtatgaaaatcatgaaatatacattgtgggcgactgttggtctgtcgttgttatttgcttcttgtgaaagcatactggatataaatccaaaagatcgcttgacgactaaggattactttacaaatgaagaacaattacagttgtatagtaatcagttctattcaaacaactttccgggtgatggtgatatttacagggacaatgccgatatgctgatcgtatctcctttggacgatgaagtgagtgggcagcgtgtcattccggaaacaggtggaggatggaattggaatgcgctgcgttcaattaattttttattggagaatctggaaaactgtaaagaccagaaagtacgcaataaatatgaggcagtagcgcggttctttcgtgcttatttctatttcgaaaaggtaaaacgtttcggtgatgtaccttggtatgataaagtgttaggatcggatgatgctgatttgtataaagccagagattcacgtgaattcgtgatggaaaaggttatggaagatctcaattttgctatagaggtttttaaagaaaccaatcggaccaaagaactttatcgtattacctggtggactgcccaagcgttaaaatcacgtgtaggactattcgaaggaacataccgtaaatatcatggattggaaaattatgaaaaatatctgaatgattgtgtgagtgcatctaacgaaattatgattgcatcgggaggatattccttatatcagtccggttctcaatcataccgtaatttatttaaatcggaaaatgcgattgatgcggaaatcatattggcaagggattataataatgatttgaacctaatccatggagtgcaggctttcgaaaattcgccaactctgggacgtcctggactctcaaaaaagctggtaaattattatctaatgaagaatggagaccgtttcaccgatcaacctaattatgcaacaatggaatttaaggatgaaatagtaaatcgtgatccgcgtttggcacaaacaatccgtacttctaatataaacatgaatgttaccatgaccggataccacttgctgaaatacgctaatgataatatgaattatacgggtaatttaagtaatgatctgcctctatttaggttggcagaaatttatctgaactatgctgaagcaaaggctgaattaggcacgttgactcaaactgatattgacaacacgataaacaggctacggacacgtgcaggagtaacaggaaaattgaacatgaataaagcaaaccaaaatcctgacccttacatgtgtgattcaaagaccggttatgtgaatgttacaggagataataaaggagtgattttggaaattcgacgggaacgtgccatcgaactggtcatggaaggtttccgctattatgacctgatgcgctggaaagaaggacagtgcatagcccaatcttttcaaggattttatcttcctgccacagctatcaacaaagcgtatgatattgacggggacggaacaaatgatgtctgtttctatacaacatcgtcgcagcccaatgtaggaagtgtgacgtatgtgaaactggcgtccgatggaagcggcacttcattgtcagaaggtaattatggtaatttactgtgttatagttggatagaccgtacttggaacgaagaacgtgattatctgtatcctataccaagacaggaaataacattgtctgatggtatcgtaacccaaaatccgggatggaatgaataacaaatatgaaaaatataaatgatagattatgaaaaagataataatatatacactactttccttcatattttctgcttttgccagcagttgtgaaaataataaagataattcattattctatcccgattttacatgggatacaggagatgacgaagaagatgaagaccctgtgacagaaacctccatgcgagtggcaacttataatttactagtagagaccggtgcaggatggactaaccgacgggaacgtgtggcacaattaatcagagactacgattttgagatttgtggattcgaagaagccagttgggaacaacgttcctacttaggaactcaacttgcgagtgattatcagattctcgcttatggtcgtgacactggaaatgacgataataaggcaggagagatgagtggcattttatataagaagagccgctacacattactggatgccggacgtttctggttttccgaaactccggaaattccttccaacggatgggatgaaacaaatttcaaacgtttctgtgtatggggaaaattcaaggatagcaagactcaaaaagaattttatctttttgaaactcacatgcctttggctgataatgccagaaaacatgcatgtcaaatgctggtggatgcagtttccgataaagcaaaagacaatactcccgcattttgtaccggcgactttaatgcgactcctgatgctcccgaaatagccactacgatttgccaaagtggtatattgaaagatgcgtatcgggaagcaaccattcagcatggtgctctttttacatttccttctaaaaagaccagaattgattttatttttgtgaaacatgctacggtgctttctacccgcactattgtcagttctttatccgatcattatcctatggtgattgtagtagaaatctaaaataaaaatgaagattatgaaaaacaaattttatcatataagtacatattcggtaatgagatattggaccattttatggatggctgttttatctttctcatgctctgattttaatccgatggattcctatagccgtattccgccggatagaaacacagacatagatgacggagatgagggtgacggagcaggcgggctttttgaaaaaggttatggaacaatgaacaaaccctacctcgttatggatgtgatacagattcagaatatgagtgaagccttggtgaaaggaaagatgatttactttcagttgggggctgatattgatatgaagtctgtatctaattgggaaccattgaactcaaacggtgactattatatctattttgatggaaataaccatattataaagaatttcacctgtacagacaaagcgtatgctagtttttttggtattttggccgggacttgtaaaaatgtcggtttctataatgcccatgtagaagcagctactaatagtggggcaggggttatcggcggttatatcggagtgaaagctccgaacgctgtagagaagacagggcaggtggaaaactgttacgtctccggaaaagtgaaaggaaagtatgctggtggaatagcttcccgtatgggtagaccgtatggaggacagatttgttatatcaaaaactgttattctacagcagaggttatatctacaggagatgaatgtggaggtattgtaggttctatgtatgaaaacagcgaagtgtcgtattgctactctacaggtgtattaattggtgccaattcagtgggtggtattgctgcccttccttccgaaggagcaaaaataactgcctgtgttgcctggaactggaaaataacgggacccgctgccaaatcaggacgtattagtggagttttgtctcaaggtgaaagtgggcatcaggcggatcctgtcgcatctgaatgttatgcatgggaggatatgatttgtacaggatttgctccggaggataatgcaggttccgtttcggcaggaaaatatgatggagtaggcgaaagtgtcctgactttgcagaatagaattgccaattgggggactccatggcataatgttgggaatatagatatgggattccctattttggagtggcaactggatagaggagattatgctagttatggaggacatgacaatgaaccagaaggtgattttgctagtggagacgggactcaaaataatccttatgtgattgctaataccacccatattcagaacatgagcaaagtccttattggaaaacaaacgacctactttgttttgagtgcggatattgatatgcaggggatcaagtggacgcctttaaatggagatggtccgtacgagaaatggataatttttgatggacgcaatcatgtaattagaaatctgacttgtgactccggttcttatcccagtttctttggcgtattgtgtggagaatgtaagaatgtaggatttgtcgatgcaaatatctcatctactaaccaaggtatcggtattatagccggttatgtaggattaaatagcggtgcggtaggattcacaggtaaaatcattaactgttatactaccggaatactgaaagggtcgggagcagcaggcggaattggtggtatcttcggcggtaatggacgtattgagaactgctataccactgctactattattgatcagataaatgctgataacggcaaagcaggtggaattatcggaaggttccatgctggcaacacgacttcatatattgaaaattgttatgtaagtggtgacatcagtgctactaaaggcggctgggttggaggtatagtcggtaatatggatagcggaacactaaatatcaagaattgtgtggcatggagtaataccttgttaaacaattcaaaccaggcaaaaataggacgtatagtgggaggacataacaataatgttactgctgaaaactgctatgcttatgacggtatgattctgaaagcaggagaaactatatttaccgtatcagatgagacatcaccgtccggtagtagttttcagggagtagctaaatctgctaacgagctgaaaaacactgtcacaaactgggattcttctctttggaaagaaggaggcaacggctatccggtatttaaatggagtaaataaattgatatttaatgatttgtaatatgaagtgttctataaataagaaatattattttctacttttgattttattttttgccggaggtcttccggcaaaatctttcaacttagacaaaacgaaaccagaagatattattcgccttgcatcttataacatccgtaccaaaggagacaagggggataaggcttgggaagtccgtctgaacgcattggtagatgttgtgcgacggaataaattcgatatgtttgccatacaggaagggcgtacctctcaattaaaggatatgatgattttgaacgaatattcttatatcggtcgtgaccgtgacggggataataaaggagaacattgtgccatttactataaaaaagatcgctttaaggtgttgaaacatggtgatttctggtattcggaaactccggatataccttcttatggttggggagcacgctgtcgtcggatttgcacttggggatattttaaagacctccggactgggaagaaattctatgtgtttaattcgcatacggatcatgaagcaacagaagcaagacgacaatcttcgttcatgttgttggaacaggtaaggaaaatcgcaaaaggtagaccaaccttttgcaccggtgattttaatgccactccggacgaagaaccgatacaacttctcctgaaagatagtttattacaggattcgtatgaatgtactctgacgcctcctaaaggaccgtccggtagtttttatgcctatgacaaaactggaaaaacagctaagcgcatagattttatttttgtgactccaaaaataaaaatactttcttatcacaccattgatgatgatataaagtataataagtactcttcagatcattttcctgtaatggtggaaggactattgaaataagagaaagataatacacccaataaaatttgtcgtctttttctgataattaaaaaagaatttacaacaacgaataaatggaaaaatatttattaagtattatgaaaaataagtttctgaatgtggctttatttctgcttttgatgataccttgttgtatctatgcacaagataatctttctgcattgattccgatgcccaataaggtcacatcagattcagacatggtgttggtgttagagaatcaagtcaattgttatattgagactgatagtttggagtttgagttgaatacgctttcttctatttttaataagagattcggaatcaatgtgaaacgttctacagagagctcaaaatcagtagtacagctattgattgataaatctttaaaaacaaaagagcattatcaattgagtgtaaatgaaaagagattggtaattaaaggagctacttctgctgctgtattttatggattgatgactttggatcagattttggcgggtgatatttgtgctacaaaacaaaaaacaatagcatctgttgaaattgatgattgtccgaggtttgattatcgtgcattgatgcttgacccggcacgtaactttttacctattgatgatattaaattctatattgaccaaatggttaaatacaaatttaatgtattacaacttcatctgacagatgatcacggttggagtatttggattgaaagtcatcctagtctggcaggtgcaagattctataccaaaaaggatattcaggaattggtagattatgcagctatgcgtcatgtacaagtgattccagaagtagatatgccgggacatacggtttttttattgtcaaaatatccaaatttggcttgtattcatcagcgtcaaactgaaaaaattataggtaagacaggtcacatgatgctttgtgccggtaacgaggaggtttatgctgtgatggatgatataattggagaagttgctaagatgtttaaatctccgttaattcatttaggaggtgatgaggctgatatacctaagaattgggcacagtgtgatttgtgtcgtactttgatggaaaagagaaaatataccaagccttctcagttgatgattcctttttttgaaaatattttaggatctgttcgcaaatatggaaagaaaccaatattgtggcttgaattaaacaatgtgtatccgcctgctgacgattatctattcccatatcctcaagatgtaacgttagttaattggcgtgaaggtatgactccaacagggctggatttttctgccaagaaaggacacaatgtaattatggcccctagcgaatatacatattttgattatccacaatataagggagaattaccggaatataataattgggggatgcctattaccacattagaacgtgcatataaattagatcctggatatggtcgtcctttggaggcacagaagcatatttggggagtaatgggaccattatggggggaagccattatcgatataaatcgtgctacatacatgacatatccacgtgcttttgcactggcagaagcaggttggacacaaatggacaatcgtggttgggaatcctttaagaaacgcgttcttcctaatatcactgaactaatgaaaacgggtgtttcagttcgggtaccttttgagattacaagataaccttgtcaaaggtgcgttgctattttcaaaatatcgtgcaaatgaaaaagccggtgaagtgatacgattgactccttgtaattgtattggagaaaataaaaaagatttttaatttgataaagtaaaacgattatatgaaaaagatattactctcattttttattggtattatgttgattgcctgtagtcagaaaactgtttctgttcgtgaagtttggacaaaagagcaggctaatgagtggtataagcaatggggatggcttcgtgggtgtgattttattccgagcacggcaatcaaccaaatggagatgtagcaggcagatacttttgatccggttactattgatcgtgaactgggttgggcggaagaaataggtatgaactgtatgcgcgtatatttgcatcacctgatttgggaaacagataaagaaggatttcgtcacaacctctgtcggccggagtttgggatatgagcctgactaatctgaataaattccaattggaaaattcggatgtgataacatatcacacgtatgaaggtttggattcgcatcagtaactcattgatacattgaagcaatacggtcgtccgatgatttgtacggaatatatggcgcgtacccaaaatagcactttccaagatattatgccaatgctgaagaaagagaatatcggtgcaataaactggggacttgtagccggaaaaacaaatacgatctatgcatgggacactccattacttgatgtttctgaacctctattgtggttccacgatatattccgtagtgatgggaccccttattcggcagaagaagtggaatgtattcgttcattaactaaataattcccattaagatcggttcttttacgctcgatatccaaaggaataaactataaaaaagaatcaaattgtaaaggtcgttcattactataaatgtgtagatatatttgtgtttgtctcgttgataccattactacctttacgttattttctttttcttatacaagacattaataaactcatgagacgtttataataaaatggggaacagtttattataaacgggtcttacatttataataaacgatattttgggtaattcactaataaaacgcgaatatattaaacaaaacggggtgaaatctatgcagatttcaccccgtttctattctttcagaaacatatttatgtttctgaaaaatctctttatgtctttatttttgtatatatcatatctgttgtcagctaattggtatattgcaaatatacgaaattaaaagaggaaagtcaatagctttttaaaatttgatgtgatacaatacatgtctgcacaacggatgttcaccagggacaagcggatgatcgaattccctcattcgttccattcctattttctgcattacacgttctgaccgttggttgagaagggaagtaaaagaaaagagttcttttatatctgttttattgcgcgtatactccaaacatgcatttgcagcttcaggagcataaccctgtccccaatattcgtatgctaaccgccagcctatttctatgcctggagcaaagtctacatcaaatgtaatctgatgtagtccggtatagcccatataagtatgatcttcttttcgttctacggcatacaaaccaaagccacaagtttggaattcattttgaatacgctgataaaaggcaaatgattcttccgatgacaatgaattaagaaaaaactccatcacattcggatcggcattcatacgggcaaaaaacgggatgtcttcttctctccagtctcggagaatcagacggggtgtttctatatacttttgcataactatgataataatagaatgcaaaggtacaattcttttttccttattggaagttattcgttattataagtattaaccatcattcatcgaatatccccttccacatataatcagtctagtcagcagcgtggtacggatgtgtaaaccagaagcaggaacctactccttcggtcgaatccacgcctatttctcctcccatttgggaaacaatgctcttgcagatagaaagtccgagtcctgtaccctgaacaaaagtattcagcttcacaaaacgttcaaatacgctcttttgcttttcttccggtattcccattccggtgtcgcgcacatagaattttattttctgatgggatacttgttcatatcccagggtgatactgccttgttgggtgaactttaacgcgttatttataaagttactgattacttgggtgaatctgtttttatccgtatagatataacattccgggaatggttcctcaaaaatcaattcaacacctttactcactttcatactcattgatttgatgatttcagcacacgtctcatttacatccacattggtatatacaaaattaaatgttcccgcttcgattttcgaaagatcgagaatgtccgatatcagttgtaagagaagttcattattctcttgcacaatcttgatatattcctgccgttcgtttctgctgtccgtttctgccagaagactggaaaaaccgacaatagcattgagaggagtacggatctcatgactcatgttagctaggaaagccgacttcagacgatccagttcttccgctttatcgcgggcaataatcaatttctgttcagtttctttcaaaggcgtgatgtcataattgatacacaacatctcaataatgccgtcttgcggacggtaatccctgaccatcacattgatgctggtccatgtatatttgccattctccctgcatacacgaacttctttacgcaaactggttgcctttcccgttttcacttcacctacaaagtttttcagaacagcctgatcttcaggaactacatgtgcatatactccaataacctgtggcatgggagtaccttctttttcacccaaattcctgtaccatgtatcttgggcatatccgtctcttgtcaatacattgaaatgagcaaatcctaccttggcataatcaccgattagaagaaacagattctcaaactcctgtatcttagtgtatgcattggtcgtttccgttgtatctatattgataaacagatagttgataaatcgattttgagaatcatagagagcagtaaccttagtagtaagattaataatcccatttctccggctatctacatattgatttatttttgagaagtcataattgatggagaagtttacatcttctttcgctctcaatctctctttaacctctaaaggaatattgggattgtcgaacagattaactcccaatgcttcattcttgtcagacaagccgaatatttcaagctctttatcattaatatctaccagataaccgtctttgtcataaagttcgacgcctgccggaaggttcttatagatgtttctcaatatcttctcgctgttgtccaaagcaagacgatcttctttggcttgtaattccgactttcgcaattcgatgcaaatactgataatattagcaagagaggagaagcattgataatccacattgctccagctacgctgcgttcttaccatatcaattcccatatagccccatacctcttctttagagattagcggaactaccatcagcgatttgatatcctgcatttccaatgtctgacgatattccgcagcttcttcgggcatgtcgtccaacgtgttcagaatgatagctcttctttcggctatctgatggttccaccaggtagaagggtcccagggaatattgctcaagaattcctgttccttggatattccttcggcggtaacctcataagtgcaatcctggcgttgttcttttctgtttatttcgaagatatagatacgatcgcccaaaaactggttgaggagatctcctaatgtcttgttaaccacttgagtgacatcatcacattgcagaaaagcaagcaatgaatatgaaatattagtttgttggtaaagcagattgctcacttgaaagaaatcaatgtttccattcgtagtatcgatcggtctgtcaatatattgcagaaggcccgtcatgttcctatatccctcttcatcgggcttttggaaattaatcttggagtacacccatatttccccgtcttttgcccggattgggaacatttgttcgtatgtctccagataagaaagagacatatattcatttttaagacgcagccggtggtcttcacgtattctttggtggaattcggtgaaactgatgcggttactttcaaggccgagtaagtcaacaataaagtcagagcagatatattctttattcttcaaatctgactcccaccatcccattttggccatctgtgctatctgaacgtatttttcatagtcataatttgtttgttctttcatattgtttgctcttgttttctgtttttatattataagacactagcctacaaagataagcataacttttaaataatgaggcatttgcatatcacagcaggatgaaagtggaaatttggtgctgaaaagtggaaaaagagacaaatgagtacaaacagaggattatttcgtctttctcttagtgaagaaatgaattatataatctataatatatatcagaagaatgaaaaataccagattattcatgtttgcggcatgcacactttttttggcagcgtgtggcaggcaaaccgtgaagattatgactccgccggatgcgtcaaatcgtgttctgtttggtgcggagcagttacagactaccttggataaagccggttatcaggtaatgatgcaacagggagacacgacattctccgatcccgaaatcaaaacgattctcttgacggaagtaaatgacacgacgctcaagaaagaaggttttcatatttcgacgacgggcaatctgaccagagtgtccggcagggatgggagtggtgtcatttacggatgccgtgaactgattgaccgtgtgaatgattcggatggtaagttgaacttcccggaggaactgaaagacggtcctgaaatggtattgcgtggcgcatgtgtaggattacagaagatgacttacctgccgggacatggtgtgtacgaatatccgtatacaccggaaagttttccttggttttatgataaagaacaatggattaaatacttggatatgctggttgccaaccgcatgaattcgctgtacctttggaatggccatccgtttgcgtcattggtgaaactggaagattatccgtttgcattggaagtagatgaagaaacgttcaaaatgaacgaagaaatgttctctttcctcacagaagaagcagacaaacgcggtatctttgtcatacagatgttttataatatcattctttccaaaccttttgctgaacattacggactgaaaacacaggaccgtaaccgtcctattactcctctgattgccgattatacacgcaagagtattgccgctttcattgaaaaatatcccaatgtaggattactggtttgtctgggtgaagcgatgtgtacagtggaggacgatgtggaatggtttaccaaaacaataattccgggagtgaaagacggattacaggcattgggacgtacggatgaaccgcctcttttgttgcgtgcacacgacacggactgcaaactggtgatggacgctgccttgccgctctataagaatctttatacgatgcataagtataatggtgaatcgttgactacctacgaacctcgtggtccctggtcgaaaattcatacggatttgagttcgttgggttccattcatatcagtaacgtacatatcctggcaaatttggaaccgttccgctggggttctccggatttcgtacagaaggcggtcactgccatgcacaatgtacacggtgccaatgcgttgcacctttatccgcaggcttcatattgggactggccttatacggctgacaaactaccgaacaatgaacgtgaattccagttggatcgcgattggatttggtatcagacctggggacgctatgcatggaactgccatcgcgaccgtacagatgaaatgggttactgggaccatcagttgggcaagttctatggaacctctgacgaaaatgcaagtaatatccgtgtagcatacgaagaaagcggagagattgctccgaagttgttacgtcgtttcggtattacagagggaaatcgccaaacgttattactgggtatgtttatgagtcagcttgtcaatccgtacaaatatacgatctatccgggattctatgaaagctgcggaccagaaggagagaagctgatagagtatgtagaaaaagaatggaaaaagcaacctcatgtaggtgaaatgcctttggatattgttgctcaagtaatagaacatggagataaagcagtagcggctattgataaagcagctggttccgtctcttcaaataaggatgaatttgcacgtttacagaatgatatgcattgttatcgtgaatttgcgtatgcgttcaacctgaaagtgaaagctgccaaactggtattggattatcaatggggaaaagagattaagaatcttgaagaagctattcctttgatggaacaaagcctggaacactatcgcaaattggtggaactgacggatgaacattacttatatgccaacagtatgcagactgcccaacgtcgtattcctatcggtggagatgatggaaagaacaagacttggaaagaattgctggtacactatgagaaggaattggagaatttcaaagccaacctcgctttgttgaaagaaaaacagaatggaaatgcagtgactgaaactgtcgagattgctgcctggactcctgcaaacgtgaaactgatttctaattatccgacagtgaaagtggatgaggggacttctttatttgtggatgttccaggtaagatagaagcagtagctccggaattgaaaggaatgaaggcgctccgctttaatggaaatgagcagagagagaaaggcacaagcatcactttcgaaacggatgctccggtgaaattgttagtcgcttatttcaaagacgaccagaaaaagtatgcaaaagctccgaaactggaaatcgatgcgtcagccaatgattacggtcaggcggaacccgtattgacgaatgctgtccgtatcaatggaatgcctttggcaaatgtgcatgcatatagttttccggctggaaagcatacgttgatgttacccaaaggctatctgcaagtgttgggattcacggctgcggaaacgaaagtgcgtaatgccgggcttgccggggatgaagaaacaatggattggttgttttattaatgataatttatatttcaccacagaggacacggaggacacagagttcttctctctcttttccgtaagtaaaacagagcgatacatacgattataaatacgtaagactctttgttactctatagtggataaaaataataaacctctgtgtcctccgtgtcctctgtggtgaaattaagtattaaacgattagaaaaagtatcatgaagaagttattgctggcagtttttagtataaccaccactttctctctgtatgcgcaacgggaagttccgcaggaacgaatggagcagatttacgaggaagtaaagacaccatacaagtacgggctcgcagttgccccggcagacaattatcataagattgattgtcctaccgtttttcgccagggagacaagtggctgatgacttatgtggtttacaacggcaaaggtggaaccgatggtcgtggttacgaaacgtggatagcagaaagtgataatttgctcgaatggcgcactttgggacgggttctttcttatcgggatggaaaatgggactgcaatcagcgtggcggatttcctgcattgccggatatggaatggggtggaagctatgagcttcagacttataaaggtcgccattggatgacttatatcggtggtgaaggaacgggctacgaagctgtaaaagctccgctttatgtcggactggcatggacgaaaggagatatttctacggcacatgaatgggaatctctggacaaaccgattttgagcatccatgataaagatgcccaatggtgggaaaaactgactcaatataagagtaccgtttattgggataaagataaaacattgggagctccgtttgtgatgtattacaacgcgggcgggcgtcatccggaaacggatttaaagggcgaacgtgtcggcattgcgctttccaaagatatgaaaacatggaaacgctactccggaaatccggtcttcgcgcacgaagcagatggaaccattacaggagatgcgcatatccaaaagatgggagatgtgtatgtgatgttttatttctctgcttttgaaccttcgcgtaaatataaagcattcaatacatttgccgccagttatgatttggtgaactggacagactggaaaggggccgacctgattattccctccaagaactacgatgaactgtttgctcataagagctatgtggtgaaacatgacggagtggtttatcatttctattgtgcagtaaacaacgcagagcaacgtggcattgccattgctaccagtaagccgatgggacgttcggccgtccgtttcccgaaaccggaaatcaagaaccgccgacaaattattgaactaaatgaaggctggcaaacttctttaataaagaatgaagaattacaaagaaagaactcgactgaccaaaatggagttgatacttcatcttctctaaaccatgcttctttcaaaacagtgaatcttccccataattgggatgactactacggttatcgccaactgactcacggcaatttgcacagtaccgccatctatataaaagatttcactctcaacaactctcaattctcaactctcaactctcaacttaaaaaatatttccttcgttttgacggagtgggtacatacgccaccattacagtgaacggaaaggacttcggacgccaccccatagggcgcaccacattgactttggatgtcacagatgaattgaaacagggagtaaatcgcctggaagtgaaagccgagcatcctgaaatgattgccgatatgccttgggtatgtgggggatgttcgtcggaatggggattcagtgagggttcccagccgttaggtatcttccgtcctgtggtattggaagtaacagatgagattcgcatagaacctttcggtgtacatatatggaatgacgaaaaagccgctaacgtatttgttgaaacagagataaaaaattatagtaaagcaacagaaacggtagagttagtcaataaactaagcaatgccgatggaaaacaagttttccgtttggttgagaaagttactttagccccgggagaaatgaaagtgattcgccagcaggctcctgttgagaatcctgtcttgtggaatacggaaaatccatatctctataaattggccagcatgataaagcgtgatacgaagacgacggatgaaatttcgacacccttcggtattcgtaccattagctggccggtaaaacgaaacgatggagacggacgtttttacctgaatgggaagcccgtgtttatcaatggagtatgcgagtatgaacatcagttcggacaaagccatgcgttcagtaatgaacaggttgccgcaagggtaaaacagatacgcgcagccggtttcaatgcattccgggatgctcatcagccccatcatctcgattatcagaagtattgggatgaagagggaatcttgttttggacacaattttccgcccacgtgtggtatgacactccggagtttcgtgagaactttaaaaagttgcttcgtcaatgggtgaaagagcgtcgtaattctccgtcagtggtgatgtggggattgcagaatgaaagcactttgcctcgtgagtttgcacaagagtgcagtgaccttatccgggagatggacccgactgccaagacaatgcgtgtcataacaacctgtaatggcggtgaaggtacagactggaatgtaattcaaaattggagtggtacgtatggaggagatgtgacgaaatacggtcgtgaactctctcaaacgaaccaattattgaacggggaatatggagcgtggagaagtatcgacctgcatacggaaccgggagatttccaggtgaacggagtgtggagtgaagaccgtatgtgtcagctgatggaaactaaaatccgtttggcagaacaggctaaagatagtgtttgcggacaattccagtggatatacagcagtcatgataatcccggacgtcgccagccggatgaagcgtatcgcaagatagataaagtaggtccgttcaattataaaggattggttactccgtgggaagaaccgttggacgtatattatatgtatcgcgccaactatgttccggctgcaaaagatccgatggtttacctggtatcacatacatgggccaaccgctttgaaaaaggacatcgccgtgccactatcgaggcttacagcaattgtgattctgtattgctatacaacgatctgacaaatgaaaaggcaaccttcctcggacgtaaaaagaacaacgggacaggcactcattttatgtgggaaaaccgggatattcgttataatgtgcttcgtgctgtaggatattataaaggtaaaccggtagcagaagacctgatcctattgaatggtctggagcaagcccctaacttcgaacttctttatcaggatgataaaaagatattgaaaggagaggcaggatataattatctgtatcgtctcaactgtggaggggatgattatacagatagtttcggacagctctggttgcaggacaatacgaattattcccgttcatgggcggagaatttcaaggaactgaatccttatcttgccagtcaacgtaccaccaatgatccgattcatggcactcgtgactggacgttattccaacatttccgcttcggacgtcaccaactggaatatcgtttccctgtggcagacggaacatatcgtattgaactgtatttcacagagccttggcatggtacgggcggaagcgcttctaccgactgtgaaggactgcgcatatttgatgttgccgtgaatgattctgttgtattagacgacttggatatttgggctgaaagcggtcacgatggagtttgtaagaaagtggtatatgccacagtgaaaggtgggatgttaaaaattcatttcccggaagtgaaagcaggacaagccttgatttcaggcattgctatcgccagcacagatcaggaactgaaaccgaagatattccctgcatccggttggagctgggaaaaggcggataaagaagtgatggaaaagactccgaaagagttgcttccggaagataaaaatactcgtgtcagtatatcatacggagcggaaatggctgtactgaaaggcaaattccaaaagaaagaacatcgaaaacagatcggagtgttttttggtaaaggaaaaagcaacagcattgaatggaatgtttctaccgggttggcacaagtgtacgcccttcgctttaaatatatgaacactaccggaaagccaatacctgtcttgatgaaattcattgattcaaaaggagtggtattgaaagaggacatattgaacttcccggaaacaccggataaatggaagatgatgagcaccactaccggaacctttatcaatgccggacattacaaagtattactttcggcagaaaatatggacggaattgcttttgatgcattggatgttcaataaataaaaaacgggacacttggaagtatacataacttttcagtgtcccattattatttctttctttatttggtaagttttatcccatttatttgccaatcttttttggctgttccttccgtgaaattgaataatttagttttgagaggtaatggtttgaaagttagggaaaattcggcttctccgctttcaggcagaaagaaatgctcaccgggagtaatgccgtcagctttttgtaatgtgtatgatgcaccttgctcgtctactagttgggcgtttgcacttacttgtatccagtatttgggtatgtaatatgcatagaaatgaacgatagtggctgtgtcagtcaattctacctgcttcacttcaagaatatcagtattggtcgattcaaaacttggatggttaacgacttttctattggtgtccccggtgatactcatctcacgctttggcgcatccaaatatctacgcatctttaatttcaggctgccttgaccataacccgaccacattttcactattttaccttcaggagagataagaacataattcggaataccgttgacatcatacacagcatatagtcctgcagtctgtttcagatcacttaagttttgccaagtcatttcatgttgcgcagaagcagctttccatctattttgcgtatccgaactcaaactgatgatagtgagtcgatctttatattgctcctgaatctctttcatttcaggtaaagccatgatgcagggaccacaaccgctgctccaaaaatcaagtaacatatatttccctttgaagtcagccaaatgatgaacttttccatctaaatcaaaaagatcggcatctgccatgtcatctccttctttcaccgttttaggagggaagagattaaccttgatttcttgtccttcaatggaagctttctgttcttcgtttaatctgtcatacaaagccagtatttcttctttatgggtaaacttgggattgtatttcaaagacatactcaaacggagcaatttttccatccagacactggaaatagggacttccttcatcaaattcaattcccgctggctgataatagctaatatactatcactctttgtttgaagtgcttcccgttccgcttcggaagccgatcgcatgccactctctttgattgctatacgttgaaattcgtcccataaatcacgagaatcctcgataaatctattatgttcttgttgctcttttaccggactgtctaccctccatgtataaatcagagggtttgcgcccgttacttttatttttgcgcccggagttgcataaacatctaacgccattggaggaaaatccgtatcgcgacacatgagagacagatgatccataccactttctcctgcatttcgcttaaaaaagaaagttccattacgtatcgtatccgtgccaactacgcttcctacacgtccatccgtcaaaaataaggaaacatgagttccgtctttcactccttttacctcacctttaattatatactcgtgttgtgcttgtgaaacgagactgcctaataaaaagaggctgctaaatagtagttttttcatcatcataatattagaagtaattatacgccacaaggtaaagcttttcttcatagagtgttactccttttattgttctttaatatttctgtaaaagaaaggggtacaaaatgccctttcgttcgtctacttgatatgaagaaaaaagaacgaatgaaaatatatactttactgcttggcgcattgtttgtaagtcctacacaggcacaaacaatgcatgattgggagaatcatcatgttctccagatcaatcgtgaaccggcaagagccgcttttacccctttctctgtacagaaaggagacggttcaatctctttagacggaacctggaaattccgttggactcccgttcccaatgaaagagtcatgaatttctatcagacaaattttgatgataaagattggacggattttcctgttcccgccaactgggaagtgaacggatatggcacgcctatctatgtttcagcaggctatccgtttaaaatagatcctccacgggtgatgggagaaccgaaaactgactataccacgtataaagaaagaaacccggtagggcaatatcgccgcacttttgtattgccgaccggatgggaagtgaatggacagacttttctacggtttgaaggtgtaatgagcgccttttatgtttggatcaacggtgagcgggtagggtatagccaaggcagtatggaaccgagcgaatttaatgtcacgaagtatctgaaatccggagaaaatcagatttcactggaagtctaccgatatagtgacggttcttatctggaagatcaggatttctggcgttttggtggtattcatcgtagtattcatctgatacatacgccggatattcatgtccgtgattatgcggtacgtactcttcccgcatctgttggtaattataaagactttattttgcagattgatccgcaatttagtgtatatcgagggatgaccggaaaagggtatattttacagggagtattaaaggatgcttcaggcaaagaagttgccacattgaaaggcgatgtggaagatattcttgatttggagcataaagcaagccggatgaatgaatggtatccgcagcgtggtccgcgtaaaatgggacgtttgtcagctattataaaatcaccggaaagatggacggcagaaacgccctatctctataaattacacttaactctccaaaatgaagaaagaagagtcgtagaacagatagaacaggccgtgggcttccgctctgtagaaatcaaaaaaggacaactgttagtgaatggtaatccggttcgttttcgtggagtgaaccgtcacgaacatgatccacggacggcacgtgtcatgagcgaagaacggatgcttcaggatattcttttaatgaaacaggcgaatataaatgccgtacgcaccagccattaccccaatgtcagtcgttggtacgagctatgcgacagcttgggattgtacgtgatggacgaagcggatatagaagaacacggattgcgtggcacactcgcaagtacccccgactggcatgcagcatttatggaccgtgcggtccgtatggcggaacgtgataagaattatccatgtattgtaatgtggagcatgggaaacgaaagcggttacggaccgaacttcgctgctatttcggcatggctgcatgatttcgatcccactcgtcctgtacactatgagggggcgcagggagtggacggaaatcctgacccgaagacggtagatgttatcagccgcttttatacccgggtgaaacaagaatatttaaatcccggtattgcagaaggagaggataaagaacgcgctgaaaatgcacgttgggaacggttgctggagattgcggagcgtaccaatgacgaccgtccggtgatgacgagtgaatatgcacattccatggggaatgcattaggaaatttcaaggaatattgggatgagatatatagtaatccccgtatgctgggtggttttatatgggattgggtagatcagggaatctacaagactttacccgacggtcgtaccatggtggcttatggtggtgactttggcgataagccgaatttaaaagctttctgctttaatggattactgatgagtgaccgtgaaactacgcctaaatattgggaggtaaagaagggatatgcaccagttgaactgaaaatggaaaatgggaagctgaaagtgacgaaccggaaccatcatatcgatttatcatcttatcgctgcttatggacattgtctgtggatggaaaacagaaagaacaaggagaaattacattgccggaaatagctccaggagaaagtggaacaatagatttgccgactttccgttcattgaatcctctttccgattaccaactgaaagtaagcattgttttgaaatcggatgctctttgggcaaaggcgggacatgaagtggcctgggaacaattctgtttgcaaaaaggagatttagcttctgctgatttaattaataaaggagcgcttcaggtgaaagaggatgataaatctttattgattagcggacgcggtttttctgttcagtgggaaaagaaagtgaacggaagtatgacctcccttatatataagaacaaagaaatgctggctcactccgatgattttccggttcagcctgtcactcaagttttccgtgctccgacagataatgacaagagcttcggaaactggttggctaaagactggaaattgcatggaatggatcatccgcagataaatctggaatctttccaccatgaaaaacgtgcagacggggcggtcattgtccggattcaaactagtaatttatataaagaaggaaaagtggtgactacttctgtctatacagtcttttcagatggaacaattgatctgaaaacaactttcttgccacaaggagttcttcctgaaattccccgtttaggaatcgcattctgtctggcgcctgcttatgatacatttacctggtatggcagagggccacaggataactatcctgaccgcaaaacatctgctatgatagggctttggaaaggaagcgttgcagaacagtacgtacattatccacgtccgcaggacagtggaaacaaagaggaagtgcattatctgaccctgaccgacaaacagaataaaggtatccgtgttgacgcggtagaaaacgcattttctgcatctgccctgcattacactgtacaggacatctatgaagaaactcacgattgtaatttaaaaccacgtgcagaagttattcttagcatggatgctgccgtacttggattaggaaacagtagttgcggaccgggtgtattgaagaaatatgccatagagaaaaaagaacatacgctgcatctccgcatcagtagtaaacaatgatagcaataaataactaacacaattataaaagtaacaatgaaaaaagtaaccactttattatcgaccttagcgttggcaactaccctggctgctcaaaaccttccacaaacggaaaggcaatatctctccggtcacggatgcgacgatatggttgaatgggacttcttttgtaccaacggacgcaattccggcaaatggacgaaaattggtgtaccttcctgttgggaattgcaaggcttcggcacttatcagtatgggatcactttctatggaaaaccatttcctgaaggtgttgctgatgaaaaaggtatgtataagtatgagtttgaagttccggaaaaattccgcggcaaacaggtcagtcttgtattcgaagcttcaatgacagatacggaagtaaaagtgaacggacgcaaagttggttccaaacatcagggagccttctatcgtttttcgtacaacgtcacggatttcctgaaatatggcaaaaagaatttactggaagtcactgttgccaaagagagtgaaaatgccagtgtgaaccttgccgaacgtcgtgctgattattggaatttcggcggtatcttccgtccggtgttcctggaggtgaaaccagccgtaaacctgcggcacattgccattgacgcaaagatggatggaactttccgtgccaactgctacacaaatatttctaatgacggaatgagcatccgtacacagattttagataaaaaaggaaagaagttagcggaaggcactgtacctgtaaaagcgggtggcgactggacttctttgcaactgaatgtctctaaccctgcactatggactgcggaaactccgaatctttataaagctcaattctccctgttggataaggccggtaaggttttgcatagtgaaacagaaaattttggtttccgcacgattgaagtacgcgaaagcgacggactttatataaacggagtacgtatcaatgtacgtggtgtcaatcgtcatagtttccgtcctgaaagtggccgtacattaagtaaagcgaagaatatcgaagacgttcttttgatgaaaagcatgaatatgaattccgtccgtttgagccattatccggctgacccggaatttttggaagcctgtgattctctcggactttatgtgatggacgaattgggaggctggcatggcaagtatgatacccccaccggagtacgtctgattgaaggcatgatagaacgtgacgtgaatcatccgtctattatttggtggagtaatggtaatgaaaaaggatggaataccgaactagatggagagtttcataaatacgatccgcagaaacgtccggttattcacccgcaaggtaacttctccggttttgaaaccatgcattaccgctcttacggagaaagccagaactacatgcgcttaccggaaatctttatgcctacggaattcttgcatggtttgtacgatggcggccatggtgccggattatacgattattgggaaatgatgcgcaagcatccccgttgtatcggtggcttcctttgggtattggcagacgaaggtgtgaagcgtgtagatatggacggattcattgataaccaaggaaactttggagcagacggtattgtaggaccacatcacgaaaaggagggtagctactacactatcaagcagttatggagtccggtgcaaatcatgaatacttctatcgacaagcaatttgatggcaaattctccgtagaaaaccgttacgattatctgaatctgaatacttgccgtttcctttggaagcaagtaaaattcccgctggcaacagatgcttccaatgccgctgttcaagtactgaaagaaggagaggtgcagggtagtgatgtggctgctcattcggcaggtgtcttagatataagaacaaatatcctcgctgatacagatgctctttacctgacagcaatcgatccatacggccatgaactttggcgctggactttcccggtcaacaaactgaatcagcagacagaacagctttctcccttgtccagtcgtcctacttatacagagacagaaaatgatcttactgtgaaagcgaataagcgtacattcatcttctcaaagaaagacggacaactgaaaggggtatctgtagataaccgtaagattagtttcgccaatggcccccgtttcattggagcccgtcgtgcagaccgctcattggatcagttctataaccacgatgatgagaaagcaaaagaaaaagaccgcacatacagcgaattcccggatgctgccgtatttacgaaactggatgtgaaagaagacggaggtaatctggttgttaccgccaattataaactgggcaatctggataaagctcaatggacaatcaacccgagtggggatttggctttggattacacctacaatttctccggtgttgtagatttgatgggtattcgtttcgactatcctgaagatcaggtaatcagcaaacgctggctgggtgccggaccttaccgtgtatggcaaaaccgtattcacggaacgcaatacgatgtatgggaaaacgactataacgatcctattccgggtgagaccttcacatatcccgaattcaaaggatactttggtaatgtttcctggatgaatatccaaacgaaagaaggcactatcagtctgacaaacgaaactcctgacgcgtatatcggagtatatcagcctcgtgatggccgcgaccgtttgctttatactctccccaaaagcggaatctctgtcctgaacgtgattcctccggtacgtaataaagtaaactccaccgatttgtgtggtccctcttcacaaccgaaatgggtaaatggtccacaaaccggacgagtcattttccggtttatgtaaatgaatcatataaaggtatccacattgcgttgggtaccttttttatttggccttttgaagttcgggaatgaaaatggctacaaaattcttttccataaaataaattttctatatttggaggcaagaattcttatttatttgaggtttacgaattttctaatattcaaacacgatgaaacactattattcctttctgataataacctcattgttattagccggatgcgggcaaaaagaccgggcaaaatttcaatttgaatcatctgtacagacagaagaaagttatccgttagcgaaagaatatattaaagaggctgttatcacaggaaaagtgttgaaccgggatttttatcctcaagaaaaagaattaactctcatcattccatttttttggaaaatggaaaatcaatatcgtacccccatacaagaagatggctcattttcattccgctttccggtttatgcaaaattaagagaagtttctattcgtaattatgcagaacatttgtatatccacccgggagatagcatacatgtggaaatagacttcaaagatctttttcatcccaaagtaacaggtaatgcagaaaaactgaatcaagaaatactggcgtttacagaaagcgcctattattacatacagaattatagtataaatccgaatttgaatattaaagattttgaggctgaattaaagaaggaatatgattttcgtttggagcggagaaacgagtatctgacgaagtataagccaatggaaaatgttacgttatttactgaagagttactgaaacagggctattattacgctttgttatcttatggtaatcaatgccagtttaaaacaaaaaaagaaatggaccggtatcataaacttctgcctgcaatcaataaactttataataaagggattctttcggcacgtttatatgatattgccgatgaggtagaacgttatatagcttatgggataacatacaaagataaaaaaaatccatctgtagaagagattatgtcggcagtaggagagaatgaactgaaccagtatatatatactaaaatggcagttggctctttgaatgcaaatgatacacttgctttaacaacgaggcatacacagtttgattcgatcgtaaaaatgccgcatttgcgtgcacaagtgatgcagatatataatcagactaaatcttacctggaaaatccgcaaccagtttccaataatttattatatggtgagtttcacgaaaactcaaagctaaaaacatctatgccttacatggaacccgtctataatatacttgagaagaatcacgggaaagtgatctatttcgatttttgggctaggtggtgtccaccatgcctggcagaaatggaacctttgaaacaattgcgaagtaagtattccaccaaagacctggtcatatattccatatgtgtaagtgaacccaaggaagaatgggaagagtgcctgaatgagtattcattgaaaaaccggggaattgaatgtatttatgcatctgattattttggaaaagataacttacagaaaattcgcaaacaatggaaaatagatagaatgccctattatctgttgattaatagaaaagggcaaattgtagatttcggaactacagtatgtcccagtaatccgcaatttgtatctcgaattgaggaagccgtaaaggacagcaaataatgttgtaagagaaataaggcaaacaagaaaaagtataacaacccacacaaaaaacatcaaatacttctgatttatcatatattaatatatgttgctgtgttgaattaatttaggatagttaaagaactatttatcaacacattgattctttccatattgcatcttcgtcaaatatttggtgtgcaatagggaagtgttgggactgttttcaataagtcacgaaattatattaatagtgagtacaaaacagaccttttttcgtcttctttattgtaaaaatatagattggaatgaaaaatagactgaaacaacgaatatttgcactttctctattagcatggacagccgtatgccctgccgatgcacaacaaacacgctcacttagggagcaatttcaaaatccgtcagacgaagcaaaaccctggaccttttggtattggatgtatggtgtcgtgtctaaagaagggattacagccgatttggaggcaatgaaacatgctggattgggaggtacttacctgatgccgattaaaggtattcatgaaggcgcccaatacgatggcaaggcgcagcagttgacccctgaatggtgggaaatggtgcgtttcagcatggaggaagccgaccgtttagggttgaaactgggaatgcatatttgtgacggttttgcattggcgggaggtccctggattactccgaaagaatcaatgcagaaagttgtttggagtgatacaatcgttgatggtggaaagctcaatgcattacgtctgccacagccggaagcttatgaaaactattatgaagatattgcgctatttgctttaccggtagaggatgcagcagacgaaatgccagcaaagatcacttgcgtaaacttagcaacagcgaacaatgtaaaatctgctcaaacagtgaatatggatgccgcaggcattatccgttcttcgtatccatgctatattcaatatgaatataaacaggcttttacctgccggaatatagaaatcgttttaaatggcaataattatcaggcacatcgcctgaaagtaatggcaagtgacgatggcgtaaattatcgtttcgtgaaacagctagtccctgcccgtcagggatggcaaaatacagatgaaaattctactcatagtattcccgcaactacagcccgttatttccgtttctactggacacccgagggaagtgaaccgggaagtgaagatatggatgccgcaaaatggaaacctaatctgaagatcaaacagctgcgcctgcatcaggaagcccgtttgaatcagtgggaaggaaaagccggactggtatggcgggtggctgaatctactagggaagaggagataggaaaagaggactgctattccctttcacaggttattaatctaacggaacaatataagaatgccccggctagtcattctaaagagaaaacaatcacagctgttctcccgaaaggaaaatggaaactgctgcggatgggacataccgctaccggacataccaatgcaacgggcggaggaggaaaaggactggaatgtgataagttcaatcctcggaccgtccggaaacagtttgacaactggtttgcacaggcttttgtaaagactcatccggaggtggcacgtcgggtactgaaatacatgcacgtagatagttgggagtgtggcagtcagaattggagtgatagttttgcaaaggagttccgtacacgtcgcgggtatgacctgctaccttatttgcctttgttggcaggcattccgatggagagtgccggacgtagcgaagagattctgagagatgtccgtacgactatcgctgaactggtagtggatgtattctatcaggtgttgtctgattgtgccaaagaatatgattgccagttctcggcagaatgtgtagctccgacgatggtaagcgatggtctactgcattatcagaaagtagatcttcctatgggagagttctggttgaacagtcccactcatgacaaaccgaatgatatgctcgatgccatcagcggagcgcatatctatggaaagaatattattcaggcggaaggattcaccgaagtgcgtggaacatgggacgaatatcctgctatgttgaaaacattgctggaccgtaactatgcgctaggtatcaaccgacttttctatcatgtctacgtacataatccttggctggaccgtcagccgggcatgactttggatggtatcggacttttctttcaacgtaaccagacttggtgggataaaggagcaaaagcattttccgaatatgctacccgttgccagtcgttgttacaatatggtcatccggtaacggatattgctgtgtttactggagaagaggttccccgacgttccgtattgccggagcggttggtttcctcacttccgggacttttcggtacggaacgggtagaaagtgaacgtattcgtttggcgaatgaaggtcaacctttgcgtgtgcgtccggtaggcgtcactcattccgctaatatggctgatcccgaaaaatgggtgaatccgcttcgtggatatgcttacgacagttttaataaggatgcgttactccgtttggcaaaggcggagaatggcagaatgaagttggcggagggaatgggttataaggtggtcgtcctgccgctttcacgccctatgaatccggagccggtgctttctccggcagtgcggaaaaagatggatgaattaaaagccgcgggagtcattgtacctgctcttccttatacagaagaagatttctcggcatacggactggaacgggatatgattgtgccggaagatgtcgcttggatgcatcggagtggcgaactcggtgatatttatttcgttgccaatcagcgagaagaaacacgtacgtttacggcaagtatgcgtattaatggaagaaagcccgaatgctggaatccagtaacgggggaaatgaatactcatccttcttatcgcatccacgacaaccggacagaggttacgctgacgttggctccgaatgaatccgtattcattgtctttccgacagaagaagctgccgataaagagaggacatcgacagataagagagaaccgttgaataggacattggaaacagaagaatataccgtaacatttctggctacgggaaagactgtggtcaggaaagatcttttcgattggagtaaagaagaagacgagcagatccgctattattcgggaacagccgtttataaggccactttccgttggaaggataaactcaagaaaggacaacccgtgtatctgaacctggggaaagtctgcaatctggctacggttcgtgtaaacggaatagattgcgggactgtctggacggctccgtatcgagcagacattacatccgctttgaaaaaaggaacgaacgaactggagatagaagtcaccaatacatgggcgaatgcgctgaaaggagtggacgaaggaaaagcaccgtatgacggtatctggacaaatgccaaataccgaaaaaaagaagatactttgcttccggcaggtttactgggcatattgacaatagaaaattaggatagacttgaaaacttatataaatagaatgatgagaagttcagtaattaaaaaaggcacatggctggctagctttatgttggctgtttgcttatgcgcacatgcagaagtaaagctgcccgctatattctccgacgggatggtgatgcagcaacagacaaaagcgaatctttgggggacggccacccctaataagaaaataacggttactaccggatggaatggaaaacaatatgtggcaacagcggacaagaacggcgcatggaaactttctgtttccactcccgaagcaggaggtccttattccattactttcaacgatggaagcaaaaaaacattaaataatatcttgataggcgaattgtggctatgttccggacaaagcaatatggaaatgcccatgaaaggattcaagaatcagcctgtagagaatgccaacatggatattcttcgtagcaagaacccgaatattcgtttgtttacggtaaaacgtacttctaccttcactccgcaaacggacgtagtcggcacatggaaagaagccacaccggcgaatgtccgcgatttcagtgcgacagcttattatttcggcagattaatcaatgaaatactggatgttcctgtgggattggtggtcgccgcttggggcggttcggcttgcgaggcatggatgacagccgactggctgaaagcgttccccgacgcaaagataccccaatccgaagcggatatcaaatcgaaaaaccggacgccgactgtcctctacaacggcatgttgcatcccttgattggcatgacgatgaaaggggttatctggtatcagggagaagataactggaatcgcgcgcacacgtatgcggatatgtttactaccttgattaacggatggcgtgccgaatggaaacaaggcgattttcctttctattattgtcagatagctccctatgattatggaattattacggaaaaaggaaaagaagtgataaattctgcttatcttcgggaggcgcaggcaaaagtagaacatcgtgtgcctaacagtggcatggcggtattgctggatgcaggcatggagaaagggattcatcccgccaagaaacaaatagcaggagagcggctggcactgctggcgctgacaaagacctacggaatagaaggggtgaacggtgaaagtccatattataagagtatggaaataaagaatgatacggtcattgtgagctttgaacgggcaaaaatgtggattagcggcaagaattgctttgaatcgaagaactttgaagtagccggtgaagacagagtattctatcctgccaaagcatggattgaacgcagcaagatacttgtgaaaagcgagcatgtcccgcatccggtagccgttcgttacggattcaagaattatgtagaaggagatgtttattgtgacggactgcctttgggatctttccgttcggacaattggtgatcctgctcaccacactgtggtgagcgaaacaaactaatgaagtgataaatttatgaattatttacgtcacatttttgttcttttattcgtatttgttagcgtgtcagctctttggagtcagcatgctaatgtcatttggaacactcccagtcggaattcctccgaatccatgccctgcggtggtggtgatatcggcatgaatatatgggtagaggaaggtgatatactattctatctgagtcgtagcggtacattcgacgagaataactgccaactgaaacaaggacgttttaggattcgtctgtttcctagtccattcaaagatgcaaaagatttccgacaggaactgaaattgaaagacgggtatgtagaagtatcggcaggaggcacacagatacagttgtgggcagatgtctatcatccggtagtccatgtggaaatcaccaacgcacaacctttgcggacagaagtctcttatgagaactggcggtataaggaacgaatgatcagaaaaggagaggggcaacaatgctcttacaaatgggcacccccgaaaggagctgttaccactgccgactttgtttctttatcttccaaaaggaaactaccaggaatgacaaaaaaagaaaacttgcttttattctatcaccgcaatcccgaacaaacagtttttgacattgtcgtagcgcaacaaggaatggaaaatgtcaaatctcaaatgatgaatcctttaaagcatctgacttttggtggctatcttttcggggataatctggaatatacaggtacaacagataatatctatgccggtacagactaccgtgcctggaactttcgctcctcaaaagtttcccggaaggagcagttctgtatcgtcctgcacacagaacagacggcaacagtagaacaatgggaacaagacttgcaaatcaatctgcaaagaatagccccacaaggaaagatttcgtcaaaaattgtatcacaggataaaaaacaaactcgcctgtggtggaatgccttttggcaacgtagctttatcgaacctattggagatacagaaaacaaaaatgatagcgatataaaagaaattacccgaaactacactcttttccgctatatgctaggttgcaatgcttacggtagtgtcccgaccaagttcaatggtggattatttacctttgatccctgtcatatagacgaaaaacaggcgttcactcctgattaccgcaaatggggaggaggtacaatgaccgcacagaatcagcgacttgtatactggccgatgttgaaaagcggagacttcgatatgatgtcttcccaattcgatttctacaaccgaatgctaaaaaatgcagaactccgtacccaagtatattggcaacacaatggagcatgtttctgtgagcaaatagagaactatggtttgcctaatcctgcggagtatggcttcaaacgtccggaatggtttgacaaaggagtggaatataatgcatggctggagtatgagtgggatactatactggaattctgtcaaatgatattggaaaccaagaattatgcaaatgcagacattactccatatctgcctttaattgaaagctcgctgacattctttgacgaacattatcgccaacttgcttcccgtcgaggacggaaagcgctggatggtaacggacagcttgtcctgtttccgggctctgcctgtgaaacatataagatgactaacaatgccagcagtacaattgccgctttgcggactgtattggaaaattatgggaagaaagatgaaatgctgaaaacgattcctccgattccattgcggtacatagaaatcaaggattccttgaatcccacagcttcacccgaactgaagcaaacgatttctcctgctgtaagctgggaacgaatcaataatgtagaaactccgcaattgtatcctgtatttccctggcgcatctacggagtaggaaaagaaaatcttgaattggcccgtaatacttatttctatgatccggaagcaatcaaattccgttctcatgtcgggtggaaacaagataacatttgggcagcttgtctgggattgaccgaagaagccaagaggttgaccctcgccaaactgtcaaacggaccacatcgttttcctgctttttggggaccgggatatgactggacacccgatcacaattggggaggtagcggtatgataggacttcaagaaatgttattgcagacgaatggtgagcaaatactcctttttcccgcatggtctaaagaatgggatatacatttcaaacttcatgcaccaggtgaaacgacagtagaagcaaccttgaaagacggaaaagttacagacttgaaagttcttcccgaaagtcggaaaaaggacataataataatgatttaaaaagtctacatccctatattatgaaatgaaagaagccataaataaaagtattatgaataaaagactgtttttaattttatcagcttttctattgttattctcactgatagagaaagggtggacaatagaaacttaccgccccgaaacatcagttgccggattcattcagctccccggtagcggacgacaagtgtataacttcaatccgggatggagatttttcaagggggacattcgtggagccgaatccgttgatttcgacgattgttcctggacaattgtttccacccctcatacagtagagttaatgcctgccgaagctagcggctgtcgtaactatcaaggccctgcctggtatcgcaagcatttcgtacttcctgcggaaaccaaaggaaaacaggtcctgctccactttgaggcagcgatgggaaagcaaatcctttacttaaacggaaagcgtattcaagaacatattggcggttatcttccttttactttggatttgacagccaatggtgtacaggcaggagactcttgtctgcttgccgtttttgtagacaatagcaatgataaatcctttcctcccggcaagccccaatatacgttggattttgcctatcatggcggtatctaccgtgatgtatggatgatagctaaatcaccggtatccattactgacgcaatagagtcccagactattgcaggtggtggagtttttgttcatttcgacaagatcagtgaaaagagcgcacaagtttatgtaaatacggaactacaaaataaggatcagcattccgaaaccgttactgtggaaacggccctgacagatactgatggaaaggttatcagacgagcttccggcaagcttttcctaaaacccggagaaaagaaaacgatccggcagcagatagagataaagaaccctaaactgtggtcacccgattcaccttatttatatagagtgcaatcacgggttaaaaaaggtaatcagtccattgacggaggcatcacacgtatcggaatccgccaagcggaatttcgtggtaaggatggtttctggctgaacggaaagcccttcggtcaattagtaggcgccaaccgccatcaggactttgcatacgtaggcaatgccctgcctaattctcagcaatggcgggatgcaaaacgcctgcggaatgccggttgcacaattatccgggtagcacactatccacaagatcctgcttttatggatgcttgcgatgaactcggtatgtttgttatcgtagctactccgggatggcaatattggaacaaggatgtgaaattcggagaattggttcatcaaaacacccgcgaaatgattcgccgtgaccgtaatcacccatctgttttgatgtgggaacctattctgaatgaaacccgctatccgctcgactttgccttgaaagcactcgaaataaccaaagaagaatttccttatccgggacgtcccgtagctgctgccgatgtgcattccgccggtgtgaaagaacattatgacgtagtttacggttggccgggagatgacgaaaagactgataggccggagcaatgtattttcacccgtgaattcggagagaatgtagacgattggtacgctcacaacaacaataaccgtgcgagccgcagttggggggaacgtccgctgctcgtacaggcgctgtctctggctaaaagttatgatgagatgtaccgtactaccggtcagtttatcggtggagcacaatggcatccgttcgatcatcagcgcggttatcatcccgatccttattggggaggtatatatgatgctttccgacaaaagaaatatgcctacgaaatgttccgtagtcaatcacccgccaatcttcaccatccgctgacagaatgtggaccaatggtattcattgctcatgaaatgtcacagttctccgataaagatgtagtgatattcagtaactgcgactcggtgcgtctttctatctatgatgggacgaaatcatggactaagcctgtaattcatgccaaagggcatatgccgaatgcacctgttatattcgaagatgtatgggatttctgggaagcacgcggatatagctatacacaaaagaactggcagaaagtaaatatggttgctgaaggtatcattgacggaaaagtggtgtgtacacaaaagaaaatgccttcccgtcggtctaccaaacttcgtttgtatgcagatactcaaaaagtaaatttgatagcggacggttcggatttcattgtggtagttgccgaagtgacagatgatagcggtaatgtgcgtcgtctggcaaaagaaaatattgtgttcactgtagaaggagaaggacaaattattggtgacgctaccattggcgccaatcctcgtactgtagaattcggttcggctcctttgttggtccggtctactcggaaagccggaaagattaaagtgaaagctcatgtacaatttgaaggaacacaggctcctatggctgccgaattggagtttgaaagtatcccggccgaatttcctttctgctacaaagaacaaacaatcacttcacctacaatgaaaaccggtttgtcggaaaggaaatcggaaggaaagctacagctcaccgaagaagaacgccaacgagtattggacgaagtagaacgccaacagacagaattcggaactgaaaaatagcacaagaaacaataagaagatagtgattccagtcactatcttcaaaaaaaagactacctttgggagcattaaaacctctattattatcataaatgagaaaacggaatattctaatactattattatcgttggcgggtgtatgtgcttttgcctatccaaatatgattgtagaacattatacggctgaacgtggtttgcccaataacatcgtcaactgcactttaaaagggacagatggatttgtctggtttggcacatggtacggattatgcagctttgacggagctaaattccgttcgtatgataatcgggacggtttttattctgcagatattcctcctcgcaagattcagcgtattgtagaagataagaatggttttctatggctcaagactattgaccgcaaactatatttatttgacaagaagcatgaaacttttcatgccgtctatgatgatgtaaaagaatactccgagaatattcagattatcaagattcaaacaacagaagacggagacgttctactgttgactaaagataaaagtttgttgcgtgcacataccgataaaacaggcaagattacaatgaagcagttgcacgactcacgccccaacgtgaacgtatatgatatgcgtttgaaacataatgtgttttgtgaaactgctgaatttattaattggataggtatggattaccagattctgtctcttagaaaaggaagtgccttgaaagataaaccttccgattttatacaaaaaaaagtttctgccgatcccaaattgttcacttgcgcttcttataattccaagttcctgtggctgggagatcaaaacgggcatatctatagcattgatcctcaaaatggggttgtgaatcgttacgagataccggagatcaaacaggctatctctcgtttactggtcaccgagtccggcttgatgtatataactaccaatgacggagcatacgaatacaacatcggttacaaacagctaaccaaactaccgtttacaatcccccaagaggatagtggcatcatattctatgacaaatatgataaaatatggtttcaggaaggcaatcacgcattgatatattatgatcctctgaataaaagtagtcatcgttttacttttcccaatcagaataccattggcaattttgagatgcaggatgcaggtgagcaaggaatgttttttctcactccgggcggagaaattcttcttttcgacagggataagctggaaatgacccgtatcaatcaaatgaaacctttctctgaggatcttcccaatcaacttttttttcatttgttattggataaagatggaatcctttggttagcatctaccggtagcggggtgtatcgagtgaatttccccaaaaaacaattccagttactgaccgatatatctcccgttccagtttctacagaaaaacagacatcctggaatcaaggaatccgtgctctctatcaggcacaaaacggagatatttgggtaggaacccgatggcaggctctataccgtcttgatcgtaacggacaagtgaagcagattttctcggaccataactacctgttgggagcagtctatcatattatggaagataaagacggaaatctatggttctctaccaaaggtaatggattggtgaaagctgaaccggatatgaactcacctcatggactgcgttttacccgttacaagaatgatccgaaagattcaaactccattagtaataatgacgtatactttacttaccaagatagtcaggaacgcatttgggtaggattattgggaggaggattaaatctgattgccgaagaaaacggagaagttgttttcaaacataaatacaacggactgaaacagtatcctccttatggactatatatggaggtacgcacaatgacagaagatgaagacggtcggatatgggtaggaacaatggatggtttaatgtctttcgacggacattttgcaacacccgaacagatacaatttgagacttaccgtcaagtcagcgaacgatccaatgtcgctgataatgatatttatgtgctatataaggacactgactcacaaatctgggtaagcgtatttggtggaggtctgaacaaacttgttcgatatgataaagaaaagcatgaaccgatctttaaatcatacggcatacgtgaaggaatgaataatgacgtggtcaagtcaattgtagaagataaaaacggaaatctctggtttacaacagaaatcggtttgtcctgctttaataaagctaccgaacagttccgcaattatgataaatatgacggtttcctaaacgtagaattggaagagggaagtacacttcgtacattaaacggagatttatggctcggtacacgacaaggtatattggcattttctccggataagttggaaacacaacacatggactatgatacacgtattgtcgatttcaaaatatccaatcgcgatctgcggagttttcaggattgccccattctaaaagaatccattatttataccgatgcgattcaactgaaacacaaccagtccatgttcacaatagaattcgccgctctgaatttttataatcagaacagggtatcttatcgttacatacttgaaggatatgaaaaagaatggcattataatggaaagaaccggattgcttcttataccaatgtgcctcccggtgattatactttccgtgtagaaacgctggatgaagccaatcccgaacttgtttcgagccgaactttagccgttacggttcttccaccctggtggctgagttggtgggcaatgattatttatgtcatacttggattggcagctctttatttcggtctgcgcctggctttcttcatgatcaaaatgaagaatgatatctatatcgagcaaaaagtatcggaaatgaaaattaagttctttaccaatatttcccatgaacttcgcactcccttgacattgataaaaggacctatacaggaactgaaagaacgggaaaaattatccccgaaaggattgcagtatgttgatctgatggagaaaaataccaatcaaatgttacaattggtgaatcagatattggatttccggaagattcagaatggcaagatgcgcttgcatgtttctttgattgattttaatgaaatgatagcttctttccagaaagaattccgtgtactttcagaagagaatgaagttagtttcactttccagttaccggacgaatctattatggtatgggcagacaaggaaaaattaagtattgtcatccgcaacattatatccaatgcgtttaagttcacgcattccggtggaagtatctacgtcactaccggattgacggatgacggaaaacgctgtttcgtacgggtagaagataatggagagggcattccacaaagtaagctgactgaaatattcgaacgcttctcacaaggagagaatactaagaatccatactatcaaggtacaggcattggtctggcgctttctaaagaaatcgtaaacctgcatcatggttctatttatgctgaaagtcccgaaggacagggagccgtatttacagttgaacttctgatggataaggaacactatcgtccgtcggaagtcgacttctatgtcagcgacacggaaactgctccaaccgcttccgaagaagaagctgttacgaatatttcttcggtagaaactacagaagaagaaccggaaatagactcttcactaccgaccctgttattagtagaagataacagagatctttgtcaactgataaaattgcaattagaagacaaattcaacatccatattgccaataatggagtagaaggtttgaagaaagtccatctttaccatccggacattgtggtgacagatcagatgatgcctgagatggacgggttggaaatgttacagtctatccgtaaagatttccagatcagccatattcctgtaataatactgactgcaaagaatgatgaaggtgccaagacaaaagccataactttgggtgccaatgcttatataaccaaaccattcagcaaagaatacctgttggcacgaatcgaccagttattgtctgagcgaaaattattccgtgaacgtatccggcagcaaatggagaaccagacaacgacggaagaggatagttatgaacagtacctggtaaagaaagatgtacagttcctcgagaaaatccatcaagtgatcgaagagaatatggatgatagtgatttcaatatagatacaatagcttccggtatcggtttgagtcgttcggcattctttaaaaagttgaagagcctgaccgggttagcccccgtagatttggttaaagaaattcgtctgaacaaatctattgaattgattaagagtacggatttaagtgtctctgaaattgcttttgctgtcggattcaaggattccggctattacagtaaatgtttccggaagaaatataaccaaactccccgcgaatatatgaatgaatggcggaaaggagagaaataaccggttacaaaacgctttcttaatcgtctttttagaaaacctattaagattcgaaagaatgaacaacatcaagaaagtattatcagcatggatgctggttgcctgtatattacctgtggcagcgcagtatccggtgattccggactctgtaaaggcaagaggggcaaaacaagaagccgagtttgaacatcaatcaaatgtagcatgggaaaaagctctgccgacagttttggaagaggcacaaaaaggacgtccctataaaccgtgggcttcaaaaccggaagatttggtaaaaagtaatatccccgcttttcccggtgcggagggagggggaatgtatactcccggtggtcgtggagggaaagtaatcgtagtcacatcgctcgaagattccggtcccggaacattccgtgaagcttgtgaaacggggggggcacgtattatcgttttcaatgtatcgggcgtaatacatctcaagagtcctatcagtgtacgtgcaccgtatgtgaccattgccggacaaacggctccgggagacggcatatgtgtggcaggacagtcttttctgattgatacacacgatgttgttatccgtcatatgcgtttccgtcgtggtgcacaggatgttgcctttcgtgatgatgcggtaggcggaaatgcagtcgggaatatcatgatagaccactgttcggcaagttggggactggatgaaaatatgtctatctaccgacacgtatacaatagaggtgcagatggacacggactgaaacttccgactgtaaatatcactattcagaactctatattctccgaagcgttggacacttacaatcatgctttcggcgctaccatcggcgggcataacagtatgttctgccgtaatctatttgcttccaatatcagccgtaacagttcggtagggatggacggagatttcaattttgttaataatgtcgtatttaattggtggaatcgttctgtggacggaggagataataaaagtttctataacatgattaataattacttcaaaccgggccccattactccattagacaaaccgatctcatatcgtatcctcaaaccggaagccggacgtgacaaaaaccgtcctttatcttttggaaaagcttatgtcaacggaaatatcattcatggaaatgcaaaagtgacaaagaacaattgggatggcggtgtacagcttaaggatggcgtagactcagaaaagttccttccgcaaattaaatcggacgaagcattcaaaatgcctcctgtcactataatggatactccaaaagcctatagctttgtattggacaatgcaggagctaactttccaaaacgtgatgcagtcgattcccgtgtgatcaaaacagtacgaatgggtaaagccatttatgtaaaagacgctccggaatttgtgtcaccatatgtaaagagacgtttaccggcagactcttataaacaaggaattattacagacatccgtcaagtaggcggacttcccgaatataaaggagaaccgtatgccgatacagataatgacgggatgccggatgtttgggaagttgctaacgggctgaatccgaacgatccttccgacgcagtgaaagattgtaatggggacggctatactaacattgagaaatatatcaatggtatcgatacaaagaagaaagtggattggacagatttgaaaaacaatcatgatacactttctaaaaggaaaagtctgttttagccaaataaattgataataaagtttattgtaatgaatatacaaataagaactatccttttgggattattaagtatcgggtttgcgcagagtcatgcgcaaacctttgctttacaagtaaaagacgaccggattacttaccttaatgacgaattgggaaataggattctcgatttctcaacgtgtggttatcaggcttcggaacaggatattccctccgttcggaatgtcgtatttgtatcttggaaacccggagacaatacaacaagaattcaacgtgccatagactatgtagcctccttgcctcctgatatttcaggtttccgcggtgctgtgttattggataaaggcgagttttccctgtccggaagtatccgcattgctacatccggaatcgtattacggggaatggataaagaaagtacaatattattaaagaaaggagtggatcggggttctcttatctatatggaaggagaaaacgacttggtaataaaagatacattacaagtactctcaaactatgttccggtgaatacaaaaacgttggaagtcgctttggggacttctctgaaaaaaggagaccggattatggtaacccgtccttccggtaaggagtggattgcttctttaggttgtaacatctttggaggaggaatcagcgccttaggatggaaagaaggggatatggatttaacatgggaccgggttgttagcgatattaatggtaacctgcttaccttagatgcaccgttgactgtggcattggatgccaaatacggtgtatctaccattatgacataccaatggaacggacgtattgaaaactgcggtgtagagaatctgacattggtctcagattatgataaacactatccgaaagacgaggatcattgttggacagggatttccatcgaagctgcagaaaactgctgggtaaggcaagttaatttcaggcattttgcaggaagcgctgtaatcgttcaacggaccggttctaaaatcactgtcgaggattgtatttcgaaagatcccgtttccgaaataggagggatgcgccgttgtactttccacacattgggacagcagactttattccaacgttgttattcggaacaaggcattcacgatttcgcggccggattctgcgctgccggccctaatgctttcgttcaatgcgattcgtaccaatctttaggattcagtggttctattgatgcttgggcgtgtggtttactgtttgatgtcgtcaatatcgacggacataatctcacttttaaaaatttagggcaggataagaatggagccggttggaatacaggcaacagtctgttctggcaatgtaccgctgcagaaatagaatgttatactccggcaaaagatgcacaaaatcgtgcgtatggttgctgggcacagttctcgggagacggagaatgggcacagtccaataatcatgtccagccacgcagtatattttatgcccaattaacggaacgcctgcaaaaagaatgcgcagaacgagcacgtatcctgcctagaaacacaagtgcaacaagtagccctaccgtagaagtagctatggcattggcaaaagaagcttataatcctcgtttgacattggagcattggatcgaagaaaataaatttatcccttcagtcgtgccaacaggagtcaaatcaatcgatgatattaaagagaaaaagactatttcaaacaaacaacggacacaaccggaaataagtatcgtcaacggacgtattcaaatggatggtgtattgcttgtaggaggcagtcatacaactccttggtggaatggaaaacttaaaaccaactttttgaaaaaagcaagccctgccatcacccgctttgtgccgggacgcgaaggattgggactgactgaccgtatcgactctgtagtcagcttcatgaaacagaagaacatacttgtttttgaccagaactatggactgtggtatgaccgccgtcgggatgaccatgaacgtatccgccgccgggatggagatgtatggggtcctttttacgaacagccattcggacgtagtggtcagggaacagcttgggaaggtttaagcaaatatgatttgaaacgccccaatgcctggtactggtcgcgcttgaaagaatttgcagagaaaggaagcaaagatggactgcttctattccacgaaaactacttccagcataatattctggaagccggagcacattgggtggactgtccgtggagaagcagtaataatatcaatgagaccggatttccggaacccgttccatttgccggagacaaacgtattttcgtagcagatatgttttacgatatcagtcatccggtacgtcgcgagttgcataggcaatacattcgccaatgtctcaataacttcgcagataattcgaatgtcattcaactgacaagtgcagaatttacagggccattgcacttcgtacagttctggttggatgtcatagccgagtgggaagctgaaaccggaaagaaagctaaagtagcattgagtacgacaaaggatgtgcaggatgctattcttgcagaccctaaacgggctgctgtggtagatgttattgatattcgttattggcattataagaaagatggaatctttgcgccggaaggtgggaaaaacatggctccccgccagcatatgcgtaagatgaaagtaggaaagataacctttaatgaagcttataaggcagtgagcgaataccgccggaagtttcctcagaaagcagtaactttctatgcgcaaaattatccttctatgggatgggcagtattcatggcaagtggctcgtgtcctgttattccgtgtaaagacaaggctttcttaaaggatgcggcagttatggaagtggaagagaccaatactgatcaatataagaaattggtaaaatctgatacaggaaatatcatttattccaagtctggaacagaaattcccattcatttatcgtccgggaaatatgtattaaagtacattcaccctaattccggggaagtgaacacaataaataaatcactgaaaataaaaggattatatactttaaaggtaccagataagaaagaaggcatttattggtttcataagctataagatagaaaatcccgttgaatgatcttcaacgggatttttgttttatataggtaaattctaataaaagagtgttataaaacatgatacttattttttcaatccacaaaccagattttacctaaggttgtgacggatactgcctagttttgcaacatcaaatcaatcgaattaatgctatgatgggacaaactaataattcaaccgaaactttattcgcttcatttcaagcggggaatatggcagctttttctcagctatatgatttatatatcaatatcctttttaattatgggctaaagctaactttggataaagagttattgaaagattgcatccatgatgtttttgtgaagctttatactaagaaagatgaactaggaactattgataatctgaaatcctatatgttcatctcattaaagaacaagttgtgcgatgaacttcgtaaacgtatgtatatgtccgatacagctattgaagaagtcgatatgctggctcctacagatgtagaaaatgattatgcggaaaaagaacagcgcaaaaatgagtttttccttattaagcgtttactaaaccaactatccccccgccagcgcgaagcactcactctatattatatagaagaaaagaaatatgaagatatctgcgaaattatgaacatgaactatcagtctgtacgcaacttgatgtatcgcggattgacaaagttacgtgatttggcaagttaattatggtaaaaagaatgctttattgagtacatatacaggataacaccgtcctatttacgtaaacgcttaaaaaggatgtgatatgtattctaaggtaaaagattttttgacggatgatgactttatcaactatgtgctgggggtggttccacagtcagcctccaaatgggaggcttatttcatggaacatccggatgaactggcagacgcggaagaagccaaggcagtattaatggctccgacagatgttgcctgtgattttacaatggctgaaagcaaagaattaaaagataggattgttagtagtataaaagatttttcgggtattttataattaggttaggtagttgctattttttttgtacttttgcgcccaattaaaaatatcacattcatgaagacaagcgaatctttattatcgataggtaaatttatagcagaatattcggcccatttaatgggcgcaggagtacatacttcgcgggtagtgcgcaattccaaacgtattggagaagctttcggactagatgtaaagttaggcgtatttcataaaaacatcattctgacaattgtagataaagagacgaatgaagcttgtaatgaagttatcgatatccccgcacatcccattagttttgaatacaactcagagttaagcgcattaagttgggaagcggtagacaatcatctgtcattggaggaactgacagccaaatacaagaaaatcgtttccgccccgatgatacatcctctcttcgtcttattgttagtcggattcgccaatgcatcattctgcaaattgttcggtggcgatttaatatctatgggaattgtcttttctgctaccatcacaggattctatctgaaacaacagatgcagaagaaaaagctgaatcattacattgtttttatcgtttcagcttttgttgcttccctttgcgcttctacagccttgattttcgatacaacttcagagatagcaatggctaccagtgtactttatcttgttcccggtgttcctttgattaatggagtgattgatatagtcgaaggatatgtactgaccggatttgcccgtctgacagaagcctccttgctgattgtcagcattgctatcggactttctttcacattactaatggtaaaaaacagtttaatttaatatgatagcactcgacatttttactgacggattttttgcagcagtggcaggtataggatttggtgcgatttccgatcctcctttgcgggcatttaagatgattgccttattggcggcattgggacacgcttgccgtttttgcctgatgacttatttaggggtagatattgctacagcttctttatttgccggcttagtgatcggttttggtagtttatggttagggaaaaaagtatattgcccgatgacagtactttatattccggctctgcttccgatgattccgggcaaatttgcatacaacatggtattttcacttatcatgtgtttgcagaacgtgaatgacccggaaaatctggataagttcatgtcaatgttcttctccaacagcctggtagcaagcacggttattttcatgttggcagtaggagccactttcccgatgttcctattcccacatagagctttttcattaacaagacattaaaactacttttatggagattttttggagaacaattgcatattataattcagctacttggcttttacagacagtcatcattctgattggtattgcattgaccggattgcttatcggtaaaccgcgcacatgggtgaagatggcgatgaagttttatatgataggactttatacatggatttcggtaatctactattatgtctattgcgaagaacgtagttacaatggagtgatggctatgttctggggagtaatggctattatttggatatgggatgcgattacgggatacacgactttcgaacgtacccacaaatacgacatcctgtcctatgtcttgttggcaatgccattcatatatcctttagtatcattagcgcgcggactttcctttccggaaatgacttctccggtaatgccttgttctgtggttgtgtttaccattgggctattattgctgtttgctcacaaagtgaatatgtttctagtccttttcctttgccactggtcattgatcggattatccaaaacttatttcttccagattccggaagatttcctgttggcaagtgccacaattcccggcctgtatcttttcttcagagaatatttcctgaacaatctgcatgccgacaccaagccgaaagccaaatatatcaattggctattgataagcgtttgcatcggactggctgtgttgctgactactaccatgtttttagaattagttccgaagaattgatctagaacacatagaagatattcaaatcaaaaaagtctttctagctttaatggctatgaaagactttttgcattacttcaggataacagtcattttctcccgccaatcttcaccattcttcggctggaaagtttcaaatcccagtcctttaccgatttggatattcgaggcgccgtcatctacaaataaagtttcagaaggaatgatattgcaatcattcaccatataatcgaatatttccggtgcaggttttgtgtgaccgacttgataagacagatatagtttatcacagtaatcattcaacggctttttccttgacgagaaatcagggctgcatgcccatgacataacgaaaggattagtattacttaaaatatacacatgatatgattttctcaattctaatatataatcgagtttatttagattcacctcattgaaaaagcccagccacgcctgtttggtttcctccatcgtcaatgaacggccacataaattccccagttgttttcgaaactcatccgcacttagcttaccttcttccagttcttgaaagatgccagtctggtgatatttatccagacgggtgtcggcatctgccagtcccagtttgataaatgcttgaaccgctttgtcacggtcaatatccacaatcacaccaccaaaatcaaatacaatgtttttaatcatgatatatcatttttaatttgctacaaagatattataaaatcattagagacttcttcattttagtacagaaatagtaaccttttatgcaatcgggtagtagtcccgttataacgtgacaatggtcaccttatagggtgacaaatggcacgttacaaggtgatatttgtcattctgcaaaatgactatttattttcagaaagatgaggaactttaaatatacgaaattaaatagtaaaaaacaagagtggcacttacttttcctaatgccccaatgagcttttcatagttggtatattttcgtttaaacaagcactttcagtaattcgggtataataatctgtaatatatatagttgaaaaataagtttccttgattaactttgcaaagttaaaacatcatcaagtttaattctgacgatgtaggacattgacatttagatctaactactataaattgaaaattaattagtttatgctacgtactatcagacttacagccgccattgtgtgctttacacttattaccctgctttttctcgacttcacgggtacattgcacacatggttcggatggctggcgaaaattcaatttctgccggctttattagccttgaacataggtatcgtattgtttttagttgtacttacatttctgttcggacgtatctactgctctgttatttgtccgttgggagtgtttcaggacattgtttcgtgggtatccggcaaacaaaagaaaaaccggttccgttattcaccagcaatgaaatggttgcggtacagcgttttaggagtattcattatcatgatggttgcaggtttgaactctttggctatcttgctggcaccgtatagtgcttatggccggatagcttccaatctttttgcaccggtctggcaatggggaaacaacctgttggcgtacttcgccgaacgaatggatagttatgctttttatgaggtagatatatggataaagagtctttcaacgatgctgattgccattgttacccttgttgttcttttcattttggcatggcgcaacggacgaacctattgtaatacgatctgccccgtaggtactgtattagggattatatccaaatatgcgatcttcaaaccgataattgatacttccaaatgcaacaactgcggtttgtgtgcccgcaattgcaaagcatcgtgtattaatccgaaagctcatgaaatagattatagccgttgtgtgacttgtatggattgcatcggaaagtgtaagcatggagccattacatacacaagatggaaacctaaaaacgaaacagcaacgaatgaagatacaaaagcaaagactgccacagccggacaggtagataacgcccgtcgcagttttctttctgcatcagccatttttgctacaacttctgtactgaaagcacaagagaaaaaagtagatggaggattggctactatcgaagataaaaagattcccaaaagagaaaatcctatctatcctcccggtgcattaagcgcacgcaatttcactcaacattgcacagcctgccaattatgtgtctctgtttgccctaaccaggtattgcgcccatcggacaacctattgacattgatgcaaccggaaatgtcatacgaacgtgggtattgccgtcccgaatgtactaaatgttcggaagtttgtcctgccggtgctattcatctcaccagtcttgccgagaaatcagctattcagatcggacatgccgtatggattaaagagaactgtgtacctttgacagacggaatggaatgtggcaactgtgcccgccattgtccgacaggtaccatacagatggtagcttccaatcctgaaaaaacagattctccaaagattccggtagtaaatgtagaaaaatgtatcggttgtggggcgtgtgagaacctttgtccgtcccgtcctttcagcgctatttatgtgacaggacaccagatgcatagaattatttgatctaaatcagtataagattatggaagataaaaataagaaagatataaatagaagagatttcattaagattgtaggtattagtgctgccacgtcgacagggctattatacggatgctcatcaaaaggtacttcctcttcaagcagcgcaacaggagaaggagaggtgcctaccgataaaatgacttaccgcacgtctccgactaccggtgaccgtgtttcactcttgggatatggttgtatgcgttggcctctcaaacctgctcccaacggtaatggtgaagtaatcgaccaggatgccgtgaatggactgattgattatgcaatcgctcacggagtaaactatttcgatacatctccggcatacgtacagggcttttccgaaaaggcaacgggtattgcattgagccgtcacccccgtgataaatattatattgccaccaagttatccaatttctctcccgatacatggtctcgtgaagcatcgctcaagatgtatcataaatcgtttgcagacctgcaggtagattacattgattatatgctgcttcatggcatcggcatgggaggaatggaagcccttaaaggccgctacctggataacggaatgcttgactttctggtgaaagaacgggaggcaggacgtatccgcaatttgggattctcctatcacggagatatcgaagtgtatgattatctgctttcacggcacgatgaattcaagtgggatttcgtacagatacaattgaactatgtagactggaaacatgcaaaagaaaccaatacccggaatacggatgctgaatatctgtatggagaactgcataaacgaggaattccatctatcatcatggaaccgcttttaggaggacgtttgtctaaattgaatgacaacctggtggcacggctcaaacaacgccgtccggaaagcagtgtcgcttcctgggctttccgttttgccggttcattcccggacattctgactgtgttaagcggcatgacttatatggagcatctgcaagataatctccgtacttattctcctttggaaccattgacagatgaagaaaaagagtttctcgaagaaacggcacaattaatgttgaaatatccaacgatcccttgcaacgactgcaaatattgtatgccatgtccgtatgggttggatatacccgctgtgttgttacattacaaccgttgcgtcaatgaagggaatgtccccaggaacgggcaggatgagaattatgcaaaagcccggcgtgcttttctagtcggatatgaccgtagcgtgcccaaacttcgtcaggcaagccattgtgtcggttgtaaccagtgtgtggcacactgtccgcagaacattgatattccgaaagagctgcatcggatagatcagttcgtagaacaattaaaacaaggtactttataaaagaaaagatggaaggattaatcaatttactacatacgggaggatattcctgtactattgccaacaaaggagaaatccgcactttcactcaacgcggtgtggctgacatctatgatttactgacccaggaaccggagtttcttaaaggagcttcgattgctgataaggtggttgggaagggagctgccgccctgatgattctgggaggtatcaaagagttatatactgatattatcagtaccaaagctctggagttgcttcagaaatcagatataaaagttagttttacagagaaagtaccttttatccggaaccgtaaccatacaggaggatgtcctgtagaaacaatgtgcagcgaagtggaatcagcagaggagatattaccgctaattggtgatttcctcgaaagaatcagaagtaaaaataaaagagtaatttgaacttaaaaaaaataaacatggaaacaactactgtaaagttctattcactaaattacaacgatgtgaaaacctattgggcagccttgttattcatcgttggtaatattcttttcccacaattattccatctcatgcctcaaggaggaataatctggctaccaatctatttcttcacactgattggagcttataagtacggatggaaagtcggcttattgacagctattctttcacctattatcaattccttatttttcgatatgcccgcccctgcagtattacccgcaattttactgaaatccatactacttgccataactgccggttgggctgcacaacgtttcggacgtatttctatcccggtattgattggtgtagtacttatttatcaggccgtaggtactttaggagaatggatatataatggtaatttttacagtgctattcaagatttccgtatcggaattcccgggatgtgcctgcaagtattaggaggctatacattcatcaagtatctgattcgcaaataaatcaatcggtcgcctcttcctcttcgggttcatcttctactacaacaacaggggagaggcttttcccttctttagcgtacgtgctaggactcattcgataatatttcttaaatacttcccgaaaatactttgtttccgagaaaccactcatatctgctatttctccgatattatgttcaccttcttttaataatcgtgctgcatattttaaacgagtcacccgaattaatgctgtcggagattgtccggtcaacgctttcaatttactatataaactagtacggctcacgccctgtaattcacaaagcttgtcaacgcaaaaatcagtattatcgatattcttttcaatatttttcttgacctccgatatgaatttccagtcgagactattcattccatttgctgatggtacaggctcggagtctatttcaagattagcataccgctgacgcaataaagcacggttggacaaaaggttggcaatattcgccttcaataacttcacactgaagggtttgacgatatattcatctgcaccgattgtgagtccatcaagaatatttttctcatcccccaaagctgtaagtaataataccggaatgtgtgaagtttcaacatccttcttaatagcagcacagagttcatctccttgcatttcaggcatcataacatcggaaagaataagttccggccagaattcttttactatcactaaagcctccctgccattacaacaggcttgcacataatattggggagaaagcagactaaccaagtaagaacgtaattcatcattatcttctacaataaggatacgttgcatttctttcttggctgtgacaacttctgtatttgctacatttgaaaaaacattcggaactgttagttccggtgtttgtagctgaatcttaggggaggaagccgaagttgcctcctgagtactcttattgtttttgggaaatataatttgaacagtcgtcccttgatgttccacacttttaatctgaatcttacccttgtgcagacgaaccaactttccaaccaacattagtcctatgccactgcccgtgactttagaattgatggcattactggcacggaaatgaagtttgaacaacttccgttcttcagaggcaggaataccgatacctgtatcactaataaccaccttccaaaaatcattcatatcagagacagagacactgaccttgccattttctgctgtatatttcaatgaattcgatataatatttttcagtatagaatccattttctctttatcaaaccatacattcaagtagttgaaattactctcataagtaaaatctatatgtttgatagtagcatacgaagagaaactattacatacatccttcaaatatgtgttcaattcatattctgagatgctcaactcggaagaatatacgtcagcacgttcaaagttgataagattagtcgccaatcgcaaaagggagtctacattccttaatgcagcctttgtacgggttattccggtgtcagtaagcggttcttcgtctagaagttcttccaaaggcgcttttatcatagtaagtggagtccgtatatcgtgagctgtattaataaaaaattgggttttctcatctgatatgttcttttgtttcctgagatttatcacacgtaaaataaaagagaatccccaaataaccaatggtacataacataggatagcccaccaactcaaccaaaaagggtgtgcgataatgactttcattgtacgttcttcaaaaataacatcatgctcttctctggatatagcgcgtacgtgtaaagtatattttcccggaggcagattggtgaaacgtatcagactatttgttcccggctgtgtccatttttcatagaacccttccaacttccaggaataaaatgtattacccggagaatcataattgatagtggagacttttagagaaaaggtattttggtcatgtttcagtttcaatacatctgtttcgtctatacattcttttaaaggagagtctttgccgtccggataaacaggctgataagatacatgaaaatcactgaatatcattctggaaaatttataagaagggaactttacattctccggaacttcaatagccccgtccgtactaccaaatacaaaacttttattcatacgtaatgtacccgaagaagcattaaaataggcaggtaacaatccttctcctctagtccaattatgaaaatgtttctcttttacaaaaaaacaagtaataccattttccgtactcatcataatacgaccgtccacttcaggtaaaattgtaaaaatccgattggaaactaatgcggaattgtctgtataatagtgctcaaaagactgtttctgtatattgtatacaaatactcctgctccattcgtgccaatatatagcaatccatcatttgcctggtaaagtgaattgatatatacaccttccaactctgatccagcatattgatatttaccggaatttctatccaataagtataatccggaggctgttccaatccacatatgatctttgtcatgttcaacaattgaagtgacagatgacactcccggatataggcgtacctcattcgtttctaaatcaaagcactttagattataatatcccccggaccatatatttcctttcgagtcttttatcatatcacggatatatttatcggggcgcatattaacggaagtaagcaggtatggaaagaaatattcaacggacaatttatgcttgtttattttataaattcccgaagtatagcctcctgcccagattatgccgggagaaacttcacacaaagtaataaagatatgatttttatcttttaattgacggtcaaaagaacttaggaatgaatgccattgtcctgtggaggagtggtataaactaattccattgctggttccaaaccataagtctccatcgctatcctcaattaccgcatgcacctgatcattgattaatgattgtttattacccattgaatgtttcatccaatgataattctcataccgataatctataacagtgattccggtagggtagttggaaagccagactctcttttcttcatcgacaaaaacattattaatattattaccattcatttcattatagctttgatagttggctacaatgtattgctccatctggcaggtatttatattaatcttatagactcccatcccttcagttgatatcaataactgtgattcatccaatggtgccatgcaggtaatacttacatcacttaaatcaacttccggctttattatttcccggttattcatatcatatacaaataggcctctctcaaacgaaccgataagcagtcgttttgatgcttgatggtaatataattcgtttacctgcacatggaaataatccaatgtttcggcaggaataattttcaaagtaccattttccaatttaagatatcgaacaccagtctccgttgatataaaaaaatgatggtcgtccacttgttcgattgcagtgatgttgctgtgtagaatattggtaaattgaagtatctgagcattttctgtgttatacaataatatggagtgtttacggcataaccaaatattattattccggtccatatagccgtaactaatggtcagactattcggcaacttatataccagcttgaaatcatcatatttcctttcatattggaagacacgtccttgtttgccaatcacccatgttcctatatggggattggtatatatccatcctaaatgaataggagattccagagaattatcatctttattcagtctataatgtttgatatccttgccattgtagcgatccatgccttcattggtaagaaaccacatatatccttcagcgtctttttgtatactgaatatccttcgattgctcaaaccttcttctatccctatatatttgtatgtttgtgcagtgacccaaataggaaaaaagaggagaatatagatgatgtatttcatataggcatttgtttttaacgacttctaataagcattgggaaataaaagttaacaaacttatacaaaagcaatgagaaaaacaaagaaatatagaatattctattaaaaactttcatttagaaagttttttgttactaaagttgtttttttgacttgctaagttgcttttatagacccatatgctaataataaaataaacaatcgtctgaatccacaaagttatatattccggttttatgtctgccatatcggcacccatagagtttagctttacaaaggcaagtgtacccggtgcagccggaagaatatagtgtactattttccaataccacggcattaattccataggataagaaactccggaaagaaatattaatccaaccgaaaaaaaagcaatcataagtaatggagcttccgaatctgtaaaatatcgcgaagcagccaatcctaaaaaagaagtggccatcagataaggtattaacaataatataatgtaaaatccatttccaatattaggaatactaaagaaatagggaaggagtcctaataagaaaaaagaaaagactgcatataaggcacaatatacaaaagtttttcccgtcaccaaacgaatggcaactccccagccatacccaaaaggtgtataagcacgaattcctctgttggcatgttcgtcaccggtcaacatacctatcaccattagcaaagtctggaaaataatgatcatcatgactgccggaatcagataagagccatatccttccgtataattatagagtgcagttcccactacatttatcggttttgccatagctactgccaataatccttgagggggtaaaaaaacagcaccatccgaccgatatttatcattgatagctaacatgacacgtgaagaagcgccttgtaatgcttcaaaatagaggaaggcatcggtcgttgcatataaagaaaatacagcttcatctccgcgaaatacccgctcctcaaaatcatgcggcaagtaaagtattccttgcacttttccttctttcatccactctttggcttcatgatagtcaattgcctgatcataaatttccgcttgaggggtcgcatccagccatcgaataaaattacgactcaattcgctgtgggaattatcaacaacggcaacaggaacatccgttacaatattaggagcgtacatataattataaagcaatccatacatgaaaattcctcccatcaacaccagtaaaacagcataactagtacttatggcaagaaactcccgacggataacaaatgatagctgttgtaatttacttaatgttttcatatttatgactttctatagctcgttttaaatggggtagtaatgacaaagccagcaaggggaagatgcagagtatcaccattgacggccaaagatagatgaatcccccacctccgtaaagcatggtttgtatcatctctgtaaaatgacggacagggaacagataagaggcatctcttactaacggatacatattagaaaccggaaaagttactccagataaagtagcccccaatgaacctaccatagaaacaacacttattaccagagagactgccgggaacagggaaaatatgaataatccgagagcctgtgtagcaataacaaagagtacggttatcatgtttatcagccaccagcttccttgaaaaggaatatgcaggataccgaacatgacataattacccagccatcctatcagaatatatataaaggtataggggagtagtttacccaaaacggcagttatcatattgcctttagcagtagccagccaatctgtagctgtgcggaacttgatttcaattccgactgtatatacggtagtcaggagaatcaatacctgaaataatacgaaaaaaaacggctggctcagataaacggaataatccaggctcggattatatatcgggtggttgttggcttgtaccggtaacaggaatgtagtaatttgctgttggtctgccccgagagataccgcttccattataatgggagataaggatacgggagccaatgacgtttcaaaggcagccatgagctcaccacctactgacaacaaggcataatgataataataggaaagagttgcattctttccggtgatagcattctgttcaaatctcggaggtatggaaagatacccgtagatttcttttttctgtacggcctcgcgggctgcagcctcatttacataatgttttactaccttaaaagtgggcactgcagagatattccgtgtaatagcccgtgaagtagcagtattgtcttggtcgataatgcctatcgggatattctccatctgcccgttaccgaaaatggtagccataaaaaagagagtaaacaacggcaggacaatacagacaccgaaataaaggcgtcgtgacgtcattcgccgccactctctgagcagtacggagcgaaaaggtgaatatgtttgtgataaatccattctatgattaattttatttgccgattaatttagcgttagcaacacagacataccgggacgcagatcatctaccttttgcgtcggacgagcatgaatctcaaatgtgcgcaaatcataacttccggtttgcttggttgatttccacgtggcgaagctacctagtggactaatatagtatatcttaaattcaacatcttttttaccgatagcaggtatatctgcgatgaaagtttcccccattttaaactgcggcatcagatcttcacgcacattgagaacaacatgtacatcatccattactaccaaattcataataggagtacccggtgcaaccaactctccacgttttgggaagatgcttgctatttgcccgtcctccggtgctgtcagccgtgcatcgagcaataaagcagaaacttcatccactgtacttttggcagcgtctaccatactggcggcagacgctttatcttctttttgtgcaccatctacagccatctggtattgttcatacgctgcacgttcggctgcaacagctgctttatacatcgcttccacttcatcttttctctgagaagttacaacactatctttatataaagtaagaatacgattatacgttgtttgagcaagaccgagatcactctttgtcttgttccagagctgtaatgcagtagctacaatctggcgacgggttccagcatctatttttttattctgttgtacggcaacctgttccaaagcatttacttgttgatacttggcatatatttcaggactattgattacaacaagagtatccccttgatgtacccaatcaccttcccggacaaagaatgtgtctatacgcccgggaagttttccactaatacgaatttcagtcgcttccgcttgcccttgaagaactaacggttgtttatgcatcaatataattcccagcgctgtaaaaacaccgacagcgaacataataatgacgaaggcccatgaaagggttctactagctaatttcattgtttgttacggtttaggttgatagtttgcaaattgttcaggtgtgccacagagtgaaagtagattcatcagtgccacatcatattcataatatgctgccaaacgagccacctttacattggcaagcatggtttcagcatcaataacctcggtagaagttgccattccttcagtgaaagatttcttccggatacgaaccaattcttcacttaaagcaattgtcgcattcaatgccttcacattatcctgcgctttttgcaactgcgtatataacttatctataccaacagccaaatcgtcacgagccttcatttgccctaaagcaagcgtctgttccgttaacttcgattggcgtattttcttctcacgatccaaaccatcgaacagattccacgtaaacccgatacctatcatcgtacgcggtaacaaattactctgaataccatgcgaatataaggtttgttttccgaaaagggctatattcggcatatagccactttgtgcaatccgtacttcttgcttggcaatatgctgctgtaaccgtaactggttaagcgcatagttcccgctgtttacagagaagtcaaaaagcatcttaggaggtattgaatcattcataaaaaggggagaagtaggtgctatatcagtatctgtatcttttttattcagcaaaacttttaaagcactttgcactactgtttcttcttttcgtgcagcttccaatgcacgcttagcttcatccatatttacttgggcaaaaagtcttccggctttgtcaagcatacctgcagcttctaacttcaaggcattttcataatgtttcttcaatccgttgtaggtttcttcacgaaccgtcacaatttgttgtgccagtcgaagcccataataactttcaactaatagattttgctgattggccgatacctgtgcccgactttcccgtgccaagtcgaccatcgttcttccgatgttggtggcacggaagcgtttaccaccggaaaagagtacccactcggctgataaatcaacagttgtcagatttcttggagtcaaaggaaatataagggtatttgccccaatttgatccagtatagacgaaatgatctggtcatccggaataatggaatgtacaaagtctttagccggatcggtaaactgcgataaaggctgtttgacttcgatcttctccgacatgtgtacaaacgcacctgtagattgaagactgggataccaaaaagcattcaacttatcacgttcagccttcgcaatctcaatactcttatctgctattttcagactctgatttccttgattcaacagatgcagtgattcttcgaaacttaatggtatctgtgcatctatctgaccgatggaaaaatacaaagtcaatagtataaaaagtcgcttattttttttcatactggttaggttatatctgaatttgagatattctaacagatgaaaagagaggtttgttcatcagaaagaatatagcaatacaacaaaagaaggtttcaacgcttttttataagatgttctatttttcatcttctctttgaatcacgtttgtatcatttctatcagatagaaaaaatgatgcataaaataatgcaagtatatgcaataagcgtgttattaatggatataaactacttgattatacaaaacataaatgcatattggagttgtttctttaaaggaaaagctctgttcctttaaatggaaccaaccgttggtcggtgagaagcgtgttctccctttaaaaggaagctaccaaatagcccataaagtacctgtttgtttctaaatcttatttattttgctagaaactaaatctgtcaatttgaaataatataagcaactttattctcacatattcaatattcattctctatttagaacctagtgatagattattcactaaaatagtttatatctgaatcttattaaccggaaatcctggagttttttctatagcgactatcgtcaatctgtatatttttaattatacgggctactaatatgcgtttttttatatccggttgtttttcatcaaaacaaaagaattgaagatgctttgatttctcttttttcttgcattaaaatttctgcgattttatttgagatataaaaattatgtttacctttgcatcaccatttcataaggcttttgagtcgagaaatgcagtaaatatgcggtaatagctcagttggtagagcactagcttcccaagctgggggtcgcgagttcgagcctcgtttaccgctcttttgaaaatcaggtggttatcttaaataaactgcctgattttttatttttcaagcccccttttctatggttttatctattatcggaggaaacctaaactgaactattgtagaataaccctaattgaataaccaatatggctaagaaaatagagaaatatctccccgtagattacagtgacagtttttccatagaagttacagaaaatcgtttgtctcctaaagatattattttaaaagtctttgctcataaccccgcttggctccgaatgttgtatgcaataagggcctgtttagtcaaacctttcggtatagaaactaaagctattgaaagtgaagaacttattatagaggaagacaagcaagaagcaattatgagaaaagacgataaacatttattgttttatgtcgatattttcattacaccattggaaacaggaaaacaaatgattgaggttaccacattagtaaaataccataattgggtaggaaaggcttatttcttttgtataaaaccttttcatcgggtcatagtgcctttagttctcaaaaaggcgctatgctgaacaagcatagtcgcggattcaacgatataacgaatatgaaaaatgaaatatgtaatatagaagcaaatgactttagaaaattaatgcatgaagaatagggcagttcatgcatttttcgtatttttgcaccctgttttaacactcaagaaaactttaaatagaaaaatataatggcaaaagaactgaaagaccttaccaaacgtagtgaaaactactcacagtggtataacgatttggtggtaaaagctgatttggcagaacaatctgccgtgcgcggatgtatggtgattaagccttacggatacgctatctgggagaaaatgcaacgtcaattggacgacatgttcaaggaaacaggacacgtaaatgcatatttcccgctattaatcccgaaatcattcttaagccgcgaagcagaacacgtagaagggtttgcgaaagagtgtgccgtagtaacacattatcgcttgaagaatgcagaagacggttcaggagtcgtagtagatcctgcagctaaattggaagaggaattaattatccgtccgacatcagaaacaatcatctggaatacttataagaactggattcagtcataccgtgacctgcctattctctgcaaccaatgggcgaacgttttccgttgggaaatgcgtacccgtcttttcctgcgtactgccgaattcctgtggcaagagggacataccgctcatgctacccgtgaagaagcagaggaagaagcaatcagaatgttgaatgtatatggtgaatttgcagaaaaatatatggctgttcccgttgtaaagggagtaaaatcagccaacgaacgttttgccggtgcacttgatacttatacaattgaagccatgatgcaggatggaaaagcgttgcagagtggtacctcccacttcctgggacaaaactttgcaaaagcattcgatgttcaatttgttaataaagaaaacaagttggagtatgtttgggctacttcatggggcgtttctacccgtttgatgggtgcattgattatgactcactcggatgataacggattggtattacctccgcatttggctcctattcaggtagtgatcgttcctatctataagaatgacgaacaactgaaacaaatcgatgcaaaagtagaaggcattgtagcgaaactgaaagcattaggtatctctgttaaatatgacaatgcagataacaaacgtccgggctttaaattcgccgactatgaattgaaaggtgtacctgttcgtttggttatgggtggtcgcgaccttgaaaacaacaccatggaagtgatgcgccgtgatacactggaaaaagaaactgttacttgtgaaggcattgaaacgtatgttcagaacttgcttgaagaaatgcaggctaatatctacaagaaagcattggactaccgtaactccaagattacaacagtagatacttacgacgaatttaaagaaaaaatcgaagaaggcggatttattctggctcattgggacggaaccactgaaacggaagaaaagattaaggaagaaaccaaagcaaccattcgttgtattccgttcgattcatttgttccgggagacaaggaaccgggtaaatgtatggtaacaggcaaaccatctgcttgccgcgtgatatttgcacgttcttattaaatagaaatcacacataattataaaaaggatggaaacgattcaatcgctttcatcctttcttttttccttccatattatattatttgtgacctgtcctaatagttcataggacattcaatggttatttcaaactcttttttcaatccatttcagttttatttcagaaatatcccttttctttgtagctgtaaaaaagaaaggagacaaagttatgaagatattgattgtagaagacgaaccctctttgagagaactgattcaatgttcacttgaaaaagaacgttacgttgtggaaacagccagtgactttaattctgctctacgcaaagttgaagattacgactatgattgtatcttattggacatcatgctaccggacggaagcggacttgatcttcttgaacggctgaaagctctccataaacgggagaatgtaattattatttccgcaaaggactccttggaagacaaagttttgggactggaactgggagcggatgattatttaccgaagccatttcatttggttgaactaaatgcacggattaaaagcgtgattcgccgtcatcagcatgacggagaaattgatatccgccaaggtaatgtacgaatagaaccggataaatatcgtgtatttgtcaacgatcaggaagtggagctaaatagaaaagaatatgacatcctgttatattttatcaatcgtcccggaagattaatcaataaaaacactttggccgaatcagtatggggagatcatattgaccaggttgacaattttgacttcatatatgcacagattaagaatcttcgcaaaaagctcaaagattcgggtgcaaatattgaaatcaaagcagtctatgggtttgggtataaaatggtagtagaataaaaaaagagattattgtccatgaaattaatatattacatcattcttcgtattacgcttgctttgaccttcatactgacggtctgggctatctttttttatgttacgatgattgatgaagtcaacgatgaagtggatgacgctctggaagattattcggaaaccatcattatccgggcattggcaggagaggagctaccttctaaaaccaacggctccaacaatcaatattatatgatggaagtaagcaaagaatatgcggaaagccgggaggatattcaatataaagactctatggtatatattgaagaaaaagaggaaaccgaaccggcacgtattcttactactatctttaaagacgatgaaggacgataccacgagctgacagtatcaactcccagcattgaaaaagatgacttgagagatgccatccaagtatggattatatttttgtatgtagctctgttattctgcattattatcatttccgtatgggtgttctatcggaatatgcgaccgctctatgtgcttcttcattggttggacggttatcaaacaggaaaaaagaataagccgttgagtaacgaaacccaaatcacggaattccgaaaattaaatgaggctgctattcgttatgtagaacgtacggagcagatgttcgaacaacaaaaacaatttatcggaaatgcttcacatgagatacaaactccacttgctatctgccgtaaccgactggaaatgttgatggaagatgattcgttatcagaaaaacaactggaagagctgatgaaaacccaccagactttagaatacatcactaaattaaacaaatctctactattgcttactaaaattgacaatggccagtttacggataccaagcaattggaactaaatggacttctcaaacaatatctgcaagattacgaagaagtttacgactatcgtaacatagaagtaactatcgatgaacaggacattttcaatgtgacaatgaacgaatctctggctgttgctttactcacgaatctcctaaaaaatgcatttgtacataacattgacgggggacatatccggatcactgttaccaaaaacagtattactttccgaaattcaggagtagaaaatccgttggataaagaacatatcttcgaacgtttctatcaaggaactaaaaaggaaggatctacaggtctgggactagcaatagccgattctatctgtcgtttgcaacacttgagtataagatattacttcgaacagaaagagcactgcttcgagatttccagacaataattttttattcagaaaacacaaaggacacggagtaaaaagtgaataactgatcggtaatcatcatctgatctatcaggtatattcatttaacttatttctctgtgtcctttgcgtcttttatggtgagtcagttatcgggatcgtatttctctcctcataaacatgatataagagatagcgaaacagataactgttgctgcaatcagtcccgtcagttgcggccatacgactaaaagactttgtcccaacgggagcggactgggaatagctccctgcacctgttccatagtcaatggtcccaaacttctaacagaaggcatcaataatgtagtggtagcttcattaaacaattcactcggtgccaaacgcatcaatcccaaaataaacttttgataactgataatctgataaggcgacgccatctgtgacggacttaaaccttttgccaccaaattaacaatcatggtatagaatacgctaaagaacaaccaaacagccaccgatgccaatgcagaagtcgctgcctgacgaaaacgaagtgaaaacaaaatagctaaattcagccaaaatgctacataaaagatactggtaatgatgaagaaaacaattcgccaaaactcttctgctgtaggaggaatgccaatggcaatcaatccacagcccattaccaaaaagcccaatacaaacagcatgatacctattacaattagagcagccacaaacttcgcgttaataatgcaatcacgatgaataggctgggacagcatacggctcaacgttcctttattttgttcggaattgactgcgtcaaatcctaaggcgattcccaataaaggtcctaagaagttaataaacaatacaaaagaggggagagtcccatctgaaaccgtaaacaacttcaaaaataaaaacgagccgtccggatcattaggcttgatagcttcaccaatatttgtgagtgctgtatatagcgatcccatgcaggtaagcgctataatacctattaatataatgaaacgccaacttttgacatggtcggaaatttccttgttgacgatcacccaaaaaggatgattgactttattcatgtctttctcctccttcctcaaaataatggttataaatatcagacaattcctgtttcttgtctttcagttctgccatatcgatcaacgcaagtaattggccattactaaacaaaccaacacggtcgcatactttctgtacctgatccaagtgatgggaagagaaaagtacagtcaacccctcttccttactcaaccagcgaatcagttcgataaactcctgaacaccggccgggtcaattcctgaagtcggttcatcgaggataataatctccggatttttaataagcacatcagccaatcccaaccgctgtctcataccacgagaatattttccggtctttttggttaactgttcttcaaggcctacccgcttcatcagttccatagctttggttttcgcctccttatcaggaataccatttaatcgcgctgtatagatcaagttctccggtcctgtcatatcatcataaaatcctacatcttcaggcaaataacctatcctcctttttacttcaataggatgagtggtagaatttattccacagatttcaactgttcccgaagtaggctccgtcaaccctagcatcattaagatagtagttgattttccggcaccattcggtcccagcaatccgaagatttcccctttccggatattcaggcgaatatgatctacagcagtgaaattaccatattgcttggtcaaatcggtaagtacgatcacttgttcgcccatcatttacctccttccatatttacggaacagatagtacaccacaccgatagtagcaatgatgataagaacacctacccatccccatatcatcggagtttttaccgcaattctgaactgcgcatcggcatttacttcaggggttttggccatgatagtagttacatagtccccaggcaatgcttttttagaagctttcaaagtagccatcaccgttgatgtctcgccggcttttaatgcatcaatctttgaaggttcaaaagttacttcccagtctgctggtttattggcagacaactgaatatctttcagtaatgaagagccagtgtttcttacttccagttctattttcttcatatcaccagctgtgacatctgtgctcaataacccgcgaggagtagtcagttccatttgataagaaccggtgacaactacttccagttccaattcggcagaagttgtacctgtagcagcacgtaccggaattttatagctaccggcttctacattggcaggaggggtaatatctatacttacattttgtgtactgtttgcctctacttgtgcagaagtggcttgtttgtagttcggtttaaaaacgacattccaccctctaggggcattagccatcaaagcatatagttgctgatcggcggtctgattctttaaagtagcactgaaagtgaaggttgatttcgaatttccctgcatattgggctggtcagtagtaaattcggtttggtacgttcctttttgagcaaccaccacatccaagggaagtttagcatttccggcatataccacaaaatgataattgcctttattcacttttaatggaacttcgacttttaaattaaaagtctttttctctttgggaagtaccgacagctggctaaggctccagccaccggatttcatttcgtgtttccaactggaggacaatccgctaacagaaagattcgcattcgtcaattggtccgtgttgttaataagatcaatactgtaatcaattgacgctccgggcgatacggagatttttgtgtaaggtgtgtacagaatcacgcttttcggtattgaatcattggcgtgcgtgtaactcatgggaataactcccaatagaatagcgaataataaaaaataatttgttctcatagtcataaaaaagttcttatggttatttaatatgaatatcgtcaaattcgtgtgtgcaaaaataaacgatgtgtatattagtagttttaaaagaatcctaaagaatctaatatcaagaagaaattatatgacgctatcgctataggacaatgacggtatccttatataaatagtgacgctatgttaacaggatagcgtcactatatttttgtgagatttttttcgataattctcaaaattcccaaatcttttcagattctcctttcatctttgcaatgtgaaattaataatagtagtaaaaaccaatatttaaaaaacaacgattatgaaaaagttagtattcttattagtatgtctttttactttgcaaacagtagctcgtgcagatgacgacaaacctattcaggtaactcaaatgccacaacaagcacagcagtttatcaagcagcattttgccgacagcaaagtagcattagccaaaatggaaagtgatttcttttataaaagttatgaagtgattttcactaatggcgataaagtagaatttgataacaaaggaaactgggaagaagtaaattgcaaatatagtgcggtacctgcagctattatccctgcaacaattcaaaaatatgtaacgaccaattatcccgatgctaaaatcctgaaaatagagagggataaaaaagattatgaagtaaaactgtccaaccgtacggaattgaaattcgacttgaaatttaatttgattgatattgattaattaaaccttttaaaacagactgataatgaaactaaaaaaatttgcttttttactggcactaagtgctatatggagtttacaaagttgtgacaataatgatgacgaatcactgaacgtacctgtagagttacagaatgccttatcatccaaatacccgaatgtaacgaatgtaaaatgggaaagtaaggccggatattatgtcgctgatttctatgaccagtatgaaatatctgcctggtttacacaggacggaatatggaaaatgactgaaacggatattcctctctctgcattgccccaagaaatacaggcctcctttgaaaacagcgaatattatcttacttggaaagtagatgatgtagataaattagaacgggatggttttgaaattatttatgtaatcgaagtggaaaaacaaaatcaagaggtggatttgcactattctgccaatggaacattgataaagagtattgttgacacagataatgatgaagatgaatatctccctgttcaactgacagaggccataaagaatttcatttataaaaactattcaaatgctcttatcatggaagtagatatagaaaacgaccgaaatgataagtattacggatatacggaagtggacatcattcataacagaatccataaagaaatattattcgattcgaacggaaactggtattcgacttcatgggaagtgcataaaaatgaacttccggagactgttaggaatgttatcgaaaagcaatataaagaatataatttggatgacgcagagtatatcgaaaaagctaatgacacaaaatattatcgcattgatttagaattaggagagactgatcttacagtaaatatagatagtgatggaaatgtcattccataaatgaaaaggttatccggtaaataaaataagcgatgataaagcctacaggactctgtcatcgcttaatttctatctatatgtatttaaagtgatagattatagatgtttgtatgtcattttgttataatactatccgtcggttgctgcccgtccttttccgatttctccctttcccgtttattacgtattttccatttattccagaaaaacaggtcgctccacttattaaaatccttcttatacataattcccaccccttgtgtggttagatttgtttttgtataataacggtcattcgtttcattgtatgccttcaaacgaatatcccctgaacgattaatcagccattctgcttcaaaatcaccgacaaaattcgtattcgccatcgggttatcccgataaccgaaatttccattaatcaataaccggttattcagcaactgtccggaaagaataccctccacttccatatctgtccaacctttgtctcctgtactcaaattcgttccgatattccagttattcgtctcaaaaacctgcgacagcgcattgttcaactgaccggacagagtggaggatagcaccgatgacatgacattcgagttctgattattattacgagcgtcttccgtatagaacttaccaattcccaacaaataaagaatctgcatattcatctgctcttcagtgctgatataattgcgtaccaatgtctgtacctcatctctttcattcggaagttcgatacccaatttgatagtaggacgcaccagcataccacttaaattcattatacaattaacccgcacattgggctgctgtataatggacgaagcatccggcatcaaatcatttaatgaagccgaatttacggtataagaagcctgtatatccatatttgcatccaaaggcgcaccattgaaagtaattgtacttccatctttaatcaaaaagtccttgcggatcacttcttgcaaactgaatttatacactccctgattgatccggtagttaccgaacatcttgacatctcctttattataaaattccgtccggatatttcccgttccttttccactgatataatctccggcaaccgggtccataataatccgcatagtggcatcgggagttgcatccaccaaaatattcaaccggatatccgttttttgttcttctgtctctgcttgacgtttttgttgtatctgatcataataagagataatttgaacagaatcctgaatagtccgacgtggcgttttatctacaaatttaataaactggttactggtagccgacgctacactaccattaatataggtaaaggtcgtattcctattcgttgtcatggccgcattcacttccagcccttgtgcagcattgccggacaacattacatttccggttccatatacagttccatagaaaggcatatccgccgattctttcgtattcatcacaagcatattatcagcctgtatctcgaaacgataattcagattcttaaaatgttcataatgcagatatccgtttaattttcccgtatgtccctccatatcggaaatatgtatattattgaatgtcaatccatcaggagccagatgaatggtatctttgatggcaaagtgagtattcagaatatcgaagttcatagatgcatctgtcattactgcaccatccagattcaatcccttgaacttgccataaaaatgcaccttacctgttccgcgtccttttatatcattagcgatgcttctcatatagtgttcgaggaacttcaaattcaattcattcgcttcaatattcaaatcaagtccgctctccggtttcaacggataaataatacccgtgacgcgcgaaggagaaggagcaatatcctggataaacgcatccaaccggattcctctattctcattgtcccattcaccatatatattcaaatctcccaatcgtccctgattgagagagaaattctttataaacaaacgagtattcatgacaggtttcttcaacacaccgcacgcgtatgccgtccccgtagcatctccctcaaaatttacatcatccgatatattggcaatatcaaacacatatcccatattgatatccttcaagtcaaccttgaccgagtcttcgggattgtcagacagacgtccgttgatacgtacataacggtcttgatggctgaaatagaaattgttcacatccacctttcccgaatccactaccacttgcgaaggatgtattttccaaagcgtatcattcaatattacatcagtaggcttcacgtctaccgttgcctttaagagcggtttttctccttccgtacggagaaacttagctacagccgccaactgtccgctatacgttacagccgcattattaccccaattcaaggttgtactgacattatcatctttggcttgcgcatccaaagaaagattaaccgctcctttctttttcagattggtcatacgaactaacgcacgaatatgatccgctggattctcacaaagaaccatacccgattctataaagttattcttatattgcaaacggggaaaatacccctctacacgcagacgctgcaaaggatcgttgaaatatcctttcaaagtagaatgggtatatattgtcaatggaatatcaaagatggtagatagaatatccgtattatagatatgtatatcaaactgaaaattattatgcgtttcaaattcttttttaggcggcaatatcagagacggaatatatttccgcataatattaagaatgctggcgggcaaggtgtggtattggaatttcccttctacatcagccgtcagaaactcagaagtcagcttcaattggttttcgtcatttttctttgtagcccgaatattcatgttcttcatgaaatactctttatccggagccgtaaattccaaactatcgacattgatttctccaatcatctcttctatggaaccacctgtgaagttggcccttaatttcaacgaaaactccgcatccgcatatttagtagtaagattaagatcatgcggacgcaccttgtgtactaccgccagaaaattgaaggtaggaactttggaagtgacattgacatccccattcagatagacggaaccattcggatcgtccaatgctaccttaccgttaaatccaccccgcttatattctccgtccagcgtgatattttcatacctgtatctactataatctattgaagcaatcaggcctttcagttctacagttgggcgctgatttgtgatatgccgtccatgcacatccagattgaaagttatttctcccaactgttcattagctaatagttcccccagcttgaagtccgttgttttcaccgcaccggagtaagcgaacagccctttgctcttatccgcacttaactttaagtcggttttcacatctcccagacttgtacgcaactgaccgtacgttaccaagtctgtgaaatatccggaaatttctccgcgaaaactaatatttcccaaacgttcgagaatgggaggaactccattataatccggattcaagttacgtactaaaaagcctaccccgcgggtattggccgaaagttcggaaagagtaccatacacatacgcatcctgcggatgtgataaatcctgtaacgagacatcccctctaagacggaattgctgttcctccgacacaatctccaaatgcgaacagttcaactggtctacagttccttttacttccatgtccaacgttatcggttccttgaaatgagaaagaaccggcacaaaaggagagatgtcctttaatgtaatctgcgacggtaacgtgcggaaagagaaatgcacttcctccgcaaaatgctcgaatgcttgtaaactgtcatacaccaagtggatagtatccatttttaaagaagtctcgggcagttcaatagcaaaattatcaatgcttgtctgtttattgttggctaccagcttcaagctcattttcttcaaagaaaatccggacatcttctcatcaaggctcaatcgcttgattcccaaattgaccgaatctttgctcaatgctttcaaagatatattggctataatattctgaagttggatatgcttggcattaaattttcccggagtctcttcttccgaaagtacatgataagacattcttccacgacgaatcaatattgaattgatacgcaaatcaagcgaactctctttctttacagtgtttttggaagcaaaagcatccagaacaaatttaaagttaggaggagtatccggtgtttccttgcgaagattaatattgaaaccgaaaagctgtacactactgatagaaatctttcccttaaaaaaaggcacaatgtcgaacttggcagacaaacgggtgactttcaacatttcctgtccactttggtcatcaagcaatacatcatcaatgataatacggttcaataatcccatattgattctgccaattaccactttcgtcttcaacacttcggaaagttcatcggcgacaaacacactcatcgcttgctgaacatttggtatgttcagcaaaacaatagttccgatatatactcccagtacaataccaactacccagcgtacagtctttttcagcgttctgataagcgattacttttattttgcgaacaaaaatataaaatagttcgttatgaatcgtagttttatgattacttttgcaccgtttaatagtttaaataacttatgagtgcaataatattaggaattgagtcctcctgtgatgatacgtcggcagccgttatcaaggatggttatctgctgtcaaatgtggtagcaagtcaagccgtacacgaagcatacggcggcgtagtacccgaattggcttcacgggcacaccagcaaaatatcgtaccggtagtacatgaagcgttgaaacgtgccggagtcactaaggaagagttgagtgcagtagcttttacacgtggtcccggattaatggggtccttacttgtcggagtctctttcgctaaaggattcgctcgttctctcgggattcctatgattgatgttaatcatctgacaggtcatgttttagctcattttattaaagctgaaggagaagaaaataaacagccgcaatttccattcctttgcctcttagtgtccggaggaaattcgcagattatattggtaaaggcctataatgacatggagattctcggtcagacaattgacgacgccgcaggtgaagcaatcgataaatgttcaaaagttatgggattaggatatccgggcggccccattatcgataagctggcacgccagggaaatccgaaagcatatacattcagcaaacctcatattccaggattggattatagtttcagtggactgaaaacttcatttttatattcattgcgcgactggatgaaggaagatcctgattttatcgaacaccataaagtggatctggcagcttcattggaagcaacggtagtagatatccttatggataaactgcgaaaagctgcgaaagagtataagataaaagaggtggctgtagcaggaggagtttctgcaaataacggattgcgtaatgctttccgggaacatgcggaaaagtatggctggaatatctttatacctaaattcagctataccactgacaacgcggctatgattgccattaccggatatttcaaatatctggataaagatttctgctctattgagcttccggcttattctcgtgtcaccctataaagttatttttctattgtcacttttccgtctaatcatttgtatgatagctgcttaacaggtgataataggagtgacaataggtgataacagtgacaattgatgatgaaataggtgacaataaccgtgtttttgcatcggaataacggcatataagcattgggatacggtaacttttgccgtttgtcttgatagaattaggagaatatgacggcagcattaataggtttcctctattctatttctttgtttcacatacacgaaacataaagtccacgtacgtggaacgagagaaagaagcaggaagaatagcttaatgaagtagggatattcttataatataataggtatatataataaataaagcaggagaaatatgtttgccgagcttataaccattggtgatgaactgctgatagggcaggttgtcgatacaaattccgcctggatggggcgggagttaaataatataggaattgaagtccttcgcatcgtatcggttcgcgatagagaagaagagatcctggaagcgattgataatgcgatgaaaagggtaaatattgttttagtaaccggaggactgggccctactaaagatgatattaccaaacaaacactttgtaagtacttcaatactgaactgatattcagcgaagaagtcttcgaaaacgtgaaacgggtattggccggtaaaataccaatgaataaactgaataaaggtcaggcaatggttccgaagaactgtacggtaatcaacaacccggtaggaagtgcttctgtaagctggttcgagagagacggcaaagtacttgtatctatgccgggagtaccacaggaaatgactaccgtaatggctgaaagcgtattacccaaactgcatgagaggtttcaaacagatgtcattatgcatcagactttcttagtacaacattaccccgaatccgtgttggcagagaaattagaagcttgggaggtcgccttaccggattgcatcaaactggcatatctgcccaaactgggaattatccgtatgagattgaccggacgcggacatgacaggaaagaagtggaaactcttctgaaccgtgagaaagcaaaattggaaacaatattgggcgaagacattttcagcgaagaagacaccccattggaagtcatcatcggggagttactgaaaaagaggaaattaaccgtatccaccgcagaaagttgcacaggtggaagcattgcggagcgactgacatctatcgctggaagttcggaatattttaaaggtagcatagtggcttattccaatgaagtgaagaaggaccttttgtacgtgtcttccgagacattggaaaagtatggagccgttagtgaagaaacggtgattgaaatggtaaaaggtgcgatgaaagcattgaaaactgactgcgctgtcgccacatcgggaatagccggaccgggaggaggcactccggagaaacctgtggggactgtatggatagctgctggttataaaaacgaaattcggacatacaagcaggaaacaaatcgcggaagagccatgaatattgaaagagccggcaataatgcgttgctaatgctccgagatttactcaaataaagaaaaatagctgcttataagtgaattattttaagaaattcttgttttatacggataaaagtacttactttgcgtcctgtttgaaataagtatagatataaaactataaaaataagatagaaatgtcgaagatttgtcaaattaccggaaagaaagccatgattggcaacaatgtttcacactcaaagagaagaactaaaagaacctttgatttgaacttgtttaacaaaaagttctactatgtagaacaagattgttggatcagccttagcatttgcgctaatgggctgcgtattatcaacaaaaaaggactggacgctgcgctgaccgaagctgtggctaaaggttattgtgattggaaaagcattaaagtaatcggctaaatgtagaggagaaaacttacaatggcaaagaaagcaaaaggtaacagagtacaggtgattctggaatgtacagaacacaaagacagtggaatgccgggaacatctcgttatatcacaactaagaacagaaagaatactacagaaagacttgagttgaagaaatacaacccgattctgaaaagagtaacagtacacaaagaaattaaataataaagaagtataacccatggcaaagaaaacagtagcaagtttgcacgatggttctaaagaaggtcgtgcttataccaaggttatcaaaatggtaaaatctccgaaaaccggagcatacgtttttgatgaacaaatggttccgaacgaaaaagtacaagactttttcaaaaaataatcgagatagcatacacgctataaattcaaaatcctctcattgataacaatgaggggattttttattgcttcttttttttacttttccaatcctttgttatatctttgtagcataatgtatcatacaaacatctataaatatgggattttttagttttttttccaaggaaaagaaggaaactttagataaaggattatctaaaaccaaagagagtgtctttagtaagatagctcgtgccgtagccggtaagtcaaaggtggatgacgaagtgttggataatctggaagaagtgctgatcacatctgacgtaggtgtggaaaccactttaaatataattaagcgcatagaaaaacgtgcagcggaagataaatatgtgaatacccaagagctgaatcatatattacgcgatgaaatagccgctttattgactgagaacaactcgggagatatagctgattttgatgtagctattgataagaaaccatacgtgattatggttgtgggagtgaatggagtaggcaagaccacaacaattggcaaattggcttatcagttcaaaaaagcaggcaagtccgtttacttgggagctgccgacacattccgtgctgccgcagtagaacagcttatgatatggggagaacgagtaggtgtgcctgtcattaagcaaaaaatgggtgccgaccctgcatcggtggcgtacgatacacttagttctgcggttgccaacaatgcggatattgtaattattgatactgccggacgtcttcacaacaaagtcggtttgatgaacgagctgacaaagataaagaatgtgatgcgaaaagtagtgcccgatgctcctaatgaggttctattggtattggacggttctacaggtcagaatgcttttgaacaggcaaaacagttcactcttgcaacggaggtgacagcaatggccattacaaaactggatggtacagcgaagggaggagttgtaatcggcatatcagatcaattcaagattcccgttaaatatatcggattaggtgaaggcatagaagacttacaggtattccgtaagaatgagtttgtagattctttgtttggagagaatgcatgaaaaaaagaagaattgatataatcactttgggatgttctaaaaatctggtagactcggaacaattgatacgtcaattggaagaagtcggatacagtgtgactcatgatacggaaaatccgcaaggtgaaatagctgttattaatacatgcggttttatcggtgacgcaaaagaggaatctatcaatatgattctggaatttgccgaaaggaaagaagaaggtgatttgaaaaagcttttcgtaatgggttgcctttccgaacgttaccttaaagaattggcaatcgagataccgcaggtagataagttctatggcaagttcaattggaaggaattgttgcaggatttaggacagacgtatcatgatgaattatatatcgaacggacattaacgactccccgacattatgcttatctgaagatatcagaagggtgtgaccggaaatgttcctattgtgctattcctatcatcacagggcgtcacatatccaaaccaattgatgaaattcttgatgaggtccggtatctggtatctcaaggcgtaaaagagtttcaagtgatcgcacaggagctgacttattatggggtcgatctatataagaaacaaatgcttccggaactaattgaacgtatctccgacattccgggtgtagagtggatccgccttcattacgcctatcctgcgcattttcctactgatttgttccgggttatgcgtgaacgcgacaatgtatgcaaatatatggacatcgccctccagcacatcagtgacaagatgttgagattaatgcgacgtcaagtcactaaggaggatacttataaactgattgagcaattccgtaaagaagtgccgggcattcacctgcggacaactttaatggtgggacatccgggagagacagaagaggactttgaagaactgaaagagtttgtacgcaaagtgcgttttgaccgaatgggagcttttgcctattccgaagaggagggaacttatgctgcggaagcgtacgaagactctatcccgcaagaagttaaacaagccagacttgatgagctgatggatatccagcaaggaatctcagctgaattgagcgccgctaaaatcggaaaacaaatgaaaattatcattgaccggttggagggggattattatatcggacgaacagaattcgactcaccggaggtggatccggaggttctgattaatagttctgaaaaagagcttgagattgggcagttctatcaagtggaagtgatagatgcggacgattttgatttatatgcaaaggttataaatgtatgaataataaggaatttacatccgagctagcggaaagactaggatataccatcaaagatacttctgaattaatcaattctttgttggctagcatgacgcaagagttggaagaaggcaacatgattgcggtacagggattcggttcttttgaagtaaagaaaaaggcggaacgcatttccataaatccggcaagcaaacagcgtatgttggtgcccccaaaactggtattatcttatagacctagtaatacattgaaagataagtttaaataaatatattccccgttatgaatgaaagactaacaattcaagatcttactgacttattggcagcaaaacatagcatgaccaaaaaggatgctgaggcgttcgtaaaagagttttttcttttgatagaacaggccttagagagcgagaatactgtaaaaatcaaaggattgggtactttcaaacttattgatgtagatagtcgggaaagtgttaatgtaaacactggtgaacgttttcaaataaaaggccataccaaagtctcgttttctccggatgcaaatttaagagatacgataaacaagccttttgcacactttgagacggttgttttaaatgagaatactgttttagaggacactcctatagaagaaacggaagaagaggaaagcggggaagaagtaattccgacagacataccggaatctatcgagccacaatcccagcctaaggaagaggaaaaagaagaaatgtctcttacagagatacaacctattgtagaaccacgatctatagaaccacaatctgttgtcgtagaaccgaaaacagttcctgtagaaaagaaagaaataattactgcggaggagattatagaacaagagcttctgagggcaaatctaaaaccggaaagtacgatagtgcggtcgcaagaaggtaagagcgagatggcaaaaggggcagaagtagcacagactgctatacagccgactccccaaaagaatattcccgattcttctgtaaaagagaaatcgcctgttccttatttaataacgatcatcatacttgttctgttattatgtggaggggttgttttattcatttattatccggatttattctcttcgtcatccgacaagaatgctcttgatatgcctcccgtaacaactcagcctgtcaagccggaagtacagttatccgacacgatcgaacaagactctgtgaaagatataaaaccggaaacacccaaaacctctatcactccgacaccggttgtccctcaaaagaaagaagcagtgacacctgccaaaactgaaaataaagttatccggcagcaaccttcaacatctgtatatttggattccgcctcttataaaataaccggaaccaagactaaatatacggtcaaagaaggtgaaactttaacaagggtctccttgcgattctatggaaccaaggctatgtggccgtatatcgtgaaacacaatccggacgttattaagaacccgaataatgtaccatacggcacaacaataaaaattccggaacttacaaaagaataagtgataaaaattccattcccccggccttacccctgtatcggccgggggaagtgttatggatgtacaaaagcgtatgaaagtaccttaatctaaagacttcgcattgttttttaataaaaattagttgcaatcgttaattatatggcgtacttttggggcaaaataaaaagccttatgctactattggcagggcttatatagaaataatgggatttaaataataaaatattaagtatttatggctgaatcaattgatatccgcgagttgaatgagcggattgaaagacaaagtgctttcgttaccaatcttacaacaggtatggaccaaatcattgttggtcagaaacatttggttgaatcgctgcttatcggattactctccgatggtcatgttcttttggaaggtgtacccggtttggcaaagactttagctattaaaacgcttgcttctctgattgatgcgaaatatagccgcattcagtttacaccggacttattgcctgcggacgtcataggtacaatggtctacagtcaaaaagacgaatcttttaaagttcaaagaggacctattttcgctaattttgtattagccgatgaaattaaccgtgctccggctaaagtacagagtgctttattggaggccatgcaggaacgtcaggttactatcggtaaagaaacatttacattgccggaacccttcctcgtattggctactcagaatcctatcgaacaggaaggaacttatccgcttccggaagcacaagttgaccgttttatgctgaaggtcgttattgattatccgaagttggaagaggaaaagttgattattcgtcagaatattaatggagaaaagttcaacgtaaaaccaattctgaaagctgacgaaattattgaagcacgtaaagtagttcgccaggtatatctggatgaaaagatcgaacgctacatcgtagacattgtattcgctactcgctttccggagaaatatgacctcaaggaattgaaagatatgatcggtttcggtggttcaccccgtgcatctatcaatttagcattggctgcccgtacatacgctttcatcaaacgccgcggttacgtaattccggaagatgtacgtgctgttgcgcatgatgttcttcgccaccgtatcggattgacgtatgaagcggaagctaataacatgacttcggacgaaatcatcagtaagattttgaataaggttgaagtgccctaaatggaaacaagtgaaatactaaaaaaagttcgtcagattgaaattaagacacgaggattgtctaataatatctttgcaggccagtatcattcggctttcaagggtaggggtatgtcattctcggaagtccgcgaatatcaattcggcgatgatatacgtgacatagactggaatgtgaccgcgcgtttcaacaaaccttacgtaaaagtgtttgaggaagaacgtgaactgacagttatgttaatggttgatgtttccggaagtttggagttcggtaccgtcaaacagttgaagaaagatatggtgacggaaattgctgccacccttgctttctctgctattcagaataatgataaaattggagtgattttcttttcagaccggatagagaagtttattcctcctaaaaagggacgtaaacatattctatatatcattcgtgaattgattgactttcaaccggaaagccgtcgtactaatatccgtcttgcattggaatatctgacgaatgtaatgaaaagacgttgcactgcttttattctatccgacttcattgatcaggaaagttttaagaatgctctgactattgccaaccggaaacatgacgtagtagcattacaggtttatgaccggagagtgagtgatcttcctcctgtgggtctcatgcgaataaaagatgcggaaaccggacatgagcagtggattgatacttcatcaaaagctgtacgccgcgcgcatcacgattggtggattcaaaagcagacggaactgaacgacacatttacgaaaagtaatgtggattcggtttctgtcagaaccgatgaggattacgtaaaggcattgttgaacttatttgccaaacgaaattaatgaaatcaaagatgagtagaaatattattctgatagcattattaggtctattatccattgataaagtagctgcacaatctgttacggtagaggcgaagatagattcattgcaaatactgatcggtgaacaggcaaaagtgcagttgcaagtggctatggatgctaaacaacatgctattttccctgcttatactgatactttagtaaaaggtgtggaaattatagaaacagtcaaaccggatacgcaatttttgaatgaccgccagcgaatgttaatcacacaggaatatgttatcacttcttttgactcggctttgtattacctgccgccaatacctgttactgtagatggcaaagagtataagtcaaaagctttagcactgaaagtctactcaataccggtcgacacattacaccctgatcaattcttcggacagaaacctgtaatgaaagctccttttgcatgggaagactggtacggtttaatttcctgctcattcttagctttacctttactcggtttgctgatctatctcattgttcgtatacgtgataataaacctattatccgtaagataaaagtagaaccgaaattgccgccacatcaagctgcaatgaaagagatagaacgtatcaaaatcgagaaagtatggcagaagggaagatcgaaggaatactatacggaattgactgatgctcttcgcacgtatataaaggatcgtttcggatttaatgcattggaaatgacatcatcggaaattattgataagttattggaattgaaggataaagaagctatatctgacctaaaagaactgtttcagactgccgatttagtgaagtttgccaagcatgatcctcagatgaacgaaaatgatgcaaacttaattaatgcaattgactttatcaatgaaacaaaacaaccggaagaggaaaatcagaaaccgcaaccaacggaaattacgattattgaaaaacgttctttacgcgttaaagtaatgttgatttgcggaattgcacttttgtctgcggcattgattggtgtctttatatatataggtatgcagatatacaatctttttgtgtaaagaatgagtaacttgaatactaaaagtaaactgttaaatcataaataaaatggtttttgccaatatagaatatctgtttttgctattactacttataccttatattgtatggtatatcttgaagcaaaggaaaagtgaagctactcttcagatttcggacgctcgggtatatgcgcatacacctaaaagttataagaactatttgttgcatgctccttttcttttacgtctttttgcgttaacattggtaattctggtcctcgcacgaccgcaaacaaccaataagtggcagaacagcgaaatagaaggtattgatataatgctggctgttgacgtttctaccagtatgttggccgaagacttaaagcccaatagattggaagcagccaaagatgtagcggcagagtttatcaacggacgccctaatgataatataggtattactttatttgccggtgagagttttactcaatgcccgttgactgtggatcatgctgtattgctagatatgattcacaatatcaaatgcggtcttattgaagatggtactgccgtaggtatgggaatagcaaatgctgtaactcgactgaaagacagtaaagcaaaatctaaagtcattattttgctgacagacggtactaacaataaaggtgatatttctcctatgacagctgctgaaatagcaaaaagctttggaattcgtgtgtataccatcggggttggtacgaatggaatggcgccttatccttatccggtaggaaatactgtacaatatgttagtatgcctgttgaaattgatgagaaaacattgacgcaaattgcaggtactacggacggtaattacttccgggctacaagtaattcgaaactgaaagaggtgtacgaagaaattgataagctggaaaagactaagctgaatgtaaaagagtatagcaaacgggatgaggaatatcattggttcgcactagctgctttcctttgtgttctattggaggtattattgcgtaattccatactgaagaagattccataaggtggtcaaccgtaaattagtcaatcgtaaaatagttaagaaagatgtttcgatttggagaacctacatatttatacctattgctgctattaccatttttagcagctttctacttgtattccaactacaagagaagaaagaatatccgacgttttggagatccggttttattggcgcagttaatgcccgatgtatccaaatatcgcccggatgtaaaattctggatactttttgccgctatcggtttgttttcagtattattagcacgtcctcagtttggttccaaactggaaacagtaaaacgtaaaggcgtggaagtcatcattgcactggatatttcaaattctatgctcgctcaggatgtacaacccagccgtttggagaaagccaaaagactgatatccagattggtggatgaacttgacaatgataaagtgggaatgattgtatttgccggtgacgctttcactcaactaccgattaccagtgattacatttccgctaaaatgtttctggaatctatcaatccttcattgatatccaagcaaggtacggctattggagaagcgattaatttggctgcacgtagctttactccacaagaaggagtaggacgcgccattatcgtaattactgacggtgaaaatcatgaaggtggtgctgttgaagcggcaaaagctgctgctgaaaaaggtatccaagttaatgtgttgggagtaggtatgcccgatggtgctcctatcccagcagaaggtaccaacgattatcggcgtgaccgtgagggtaatgtgattgttacccgcttaaatgaaacaatgtgtcaggagattgccaaagaaggaaaaggtatctatgtacgagtagataattctaactcagctcaaaaagcaatcaatcaggaagtcaataagatggcaaaatctgatgtggaatctaaggtatatacggagtttaatgaacagttccaagctattgcctggattattctattattgttattagcggaaatattaattttagatcgcaagaatcctttatttaagaacgttcatctgttttctaataagaagtagttatgcgcatgttaaaaagtaaatatattctattcgctgtgtttctgctgtcagccgcctttgtatcggctcagaaagcagaacgtgactatatccgcaaaggaaatcgcctgtttaatgacagtgtgtttgtggatgccgaagtgaattatcggaaagctttggaggtgaatcctaaatctacagtatctatgtataatttagggaatacactctcacaacaacagaaaatgcaggaagctatggaacaatatgtatcggccagcaatattgagaaggataagatgaagttggctcaaatatatcataacatgggcgtacttcttcaagccagtaaagattatgcaaaggctgtggatgcttataagatgtctttacgtaataatcctgctgacgatgagacccggtataatttggctcttgcacaaaaaatgttgaaagaccaacaacaaaataaacagaatcaggatcaaaaccaggatcaaaataaagatcagcaaaagcaagatcaaaagcaagaccagaacaaagataaacagaacgatcagaagcaagaccaaaagaaggaccaacaacaacctccaaaatctgagaaacaaaagaatcagatgtcaaaagaaaacgctgaacaattgcttaattctgtgatgcaagatgagaaagacgtacaggataaagtaaagaagcaacagcaggttatgcaaggtggtcgtttggaaaaagattggtaatataaagttgacgatataaatttcataagcaatgaagaaactgattatcatattgatagcattgatagcatatagcactcaggcatttgccgataaagtgtcttttactgcttctgctcctgacgcagtagtagtaggcgatcaattcagactatcttataccgtaactacacaaaaagtaaaagatttccgagccccatcaatcaaaggatttgatgtgttgatgggaccaagccgttcacaacaaagtagtactcagattgtaaatggcaacgtaacatctacgagtagtattacatttacgtatatattgatggccaatactgccggtgaatacacaattggcggtgcttcaattgtggccgatggtaaccaaatggtatcaaactccgtaaaaatcaaggttttaccacaagaccagaacagcaatggtggacaaggaggttcttccgcccattcctcttccggtacgagtgtatccgatcaagatctatttattactgcgacggctagtaaaacgaatgtatttgagcaggaggcatttgtcttgacttataaaatttataccagagagtctaatttgcaattgaataatgcaaagttacccgatttcaaaggttttcattcacaagagattgaaatgacaacaaatgccagatggactccggaacattatcgtggacgtaattattatacaactgtctatcgtcagttcgtgctattccctcaacaatccggaaaattgtacatagatccggcacaattccaaatgactataggcaaaccagtacaatcggatgacccttttgatgcattctttaatggaggaagtaacgttatagaaattaaaaaatctattgctacccctaagatagcaataaatgtaagtccgcttccggctggtaaaccggctgatttctcagggggagtaggagagtttacagtttcttcttctatcaatagtaaagaattaaaaaccaatgatgctatcactattaagttagtgatttccggtacaggaaatttgaagttaatttctaatccggaaataaaattcccggaagattttgaagtatatgatcctaaagtagacaatcaagttagattaactcgggaaggacttacaggtaacagagtaattgaatatttagctatccctagacatgccggcacatataagattccaggggtatcttttagctattttgacattcgttccaaatcatacaaaactctgaaaacggaagaatatgtagtgaatattgaaaaaggtgcaggaaatgccgaccaggtaattgcgaactttaccaacaaggaagacttaaaagtattaggtgaagatattcgttacatcaaacagaatgaagtaactttccaacctaaaggaagtttcttctacggctccatgtcttattggcttttctatattattccggctcttgcctttataatattctttatcatctatcgcaagcaagctgctgaaaatgcgaatgtcgctaaagtacgaaccaaaaaagccaacaaagtggctaccaaacgtatgaaattagcaggaaaactgctttctgaaaataaaaaagatgctttttatgatgaagtattgaaagctttatggggatatattagtgacaaattaaatattcctgtatctcgtttgtccaaggacaatatagaagaaaaattgagaaatcacggagtaagcgaggaattaatcaaggatttcttaaatgcactaaatgattgtgaatttgcccgtttcgctccgggagacgaaaatcaagctatggacaaggtttattcatcttcaatagaggtaataagcaaaatggagaattcaattaaacattaacctagaagagattatgtcatgaaaaaaatattattttttatattaacgttaatatcaatcacttgttttgggcaggattcattgaatgttgattccaagcaagtgaatgaaggggattccatccatgcagcaagtaccactatgttttccaataacacattggccaatgttacaaaaacggaaggagattctgcatatataaaagaagattataccgcagccattcaaatctacgaagcactgctcaaaaatggagaagcggctgaagtgtactataatttaggaaatagctactataagataggagaaatagccaaagctgttcttaattacgaacgtgccttactgctacaacccggcaatagtgatattcgggctaaccttgaagtagctcgtgcaaaaacaatagacaaggtggaagctattcctgaggtcttttttgtttcatggatcaagtcgttgataaatagtatgagcgtagatgcttgggctacattaggaattatctctttcattttattaattgtagctctctattcattcgtcttttcaaagcagatattatggaaaaaaactggattcatctcaggaatcatctttttaatcattactatatgtgccaatctgtttgcttctgaacaaaaagagcatttagtaatcagaaacgaagcaatagtgatgaatccaagtgttactgttcgtagtactccaagcgaaagtggtactagcttatttattcttcatgaagggagaaaagtaagtattaaagataattcgatgaaagaatggaaagaaattcgattagaagatggaaaagttggatgggtaccagcttctgccattgaagctatataaacaagaataatagattttataaattaagaaaaaaagataagcaaataatttgttttatctttttttttgcttaagtttatagcgtgataaagatcacatagtattaaccattaaatttacgagacatgagaacaataacatttaatgaacttcgtaagattaaagattcattgcccagcggtagcatgcatagaatagcagacgaacttggtttacacgtagataccgtgcgaaacttcttcggaggtcataatttcaaggagggaaaaagtgtcggaatacatcttgagcccggtccggatggtgggcttgtaatgatagatgatacgaccgttcttgatcgggctttaaaaattttagatgaattaaatctgagtatgcaaaaagaacaggctaccgaatctgtgcaagtttaaaatataacaaaccgaatcccaattgaataaaacaattgggatttcttatttgttcaccttataaaatatacatttatggaagataaattagtaactctagccattctgacatatactaaagctcagatattaaagaatgtcctcgaaaatgaaggtattgaaacatacattcataatgttaatcaaatacaaccagtcgtttcttcgggggttcgtttacgaatcaaagaaagtgatttaccacgtgcactaaaaataactgaaagttctacttggttatctgaaagtatagtgggagagaaggaacctaaaacagagaataaatcaaataagattttaattcctgtcgatttctctaattactcgatgaaagcatgtgaatttgcttttaacttagcaaaaactgagaacgcagaagttatcttattacacgtttattttacaccaatatatgcgtcctcattgccgtatggtgatgtcttcaattaccaagttggagatgaagagactgtaaaaactattattcatagagttcattctgatctcaacaccttatcagctaaaataaaagaaaaaatagtttcaggggaatttccggatatcaaatatagttgtattttacgagaaggcattcctgaagaagagattctcagatatgcaaaggaagaacgtcctattgttatcatcatgggaactcgtggaaaaaaccaaaaagatattgatttgatcggtagtgtaaccgctgaggtcattgatagaagccgtgttccagtattagctattccagaaaatactccatttaaacaatttagtgaagtcaaacggattgcttttataactaattttgatcaaagagatttaatagcttttgaggcattctttaacacttggaaatcgttccatttttctgtctttttgatacatcttacggaatctaaagatacgtggaatgaaataaaacttgcaggaataaaagaatatttccataaacaatacccaggtctagaaatccattatgacgttgtgatgaataataatttattgaaagggcttgaccaatatatcaaggataaccaaatagatataattacattgacttcatataaaagaaatatatttgctcgattatttaatcctagtattgccagaaagatgatatttcattccgatacgccattgcttgttattaacggatgatcgaacagacagaagcaaaaaaagaaactatattggaggaataatcaatattatgtttaatatataaaaggagtaaataataaaactttgctccttttctgttttattagccctctacttcaatctacaaagggatattcagtaaatgttcctctttctaaaaaatcaagagaaaagctcacgtaaagcaaagcttttctcttgattttttcgttcaactctcccagtcttctatcttttttgtagaatattgtttacatattcttgttttttccttcccacccatgcattatgtacatgtcttttttaggggaagttaaaacctctcctgtttttcctgttattttagtcagattatgctgcctttctttttttcttttcgaccttttctatcatacataccgcattggctgtatgtatcccaaagaaaatccaaagtacttccgttttcctgtttctagcttttatcctggccagtgagtaatgttgtttctgcgttccaaaacttccttccaggcgggtagctctttcgcggctgagttccgaccgtaagattctccgaagcggctcatctttggcagctctgcccttacgcttaaaggaagtacttatatgatattttgtacaaaatttccggttggcattattggcatagattgaatccgccgcaagcgccttaaccctaaccccggtcagttgttgttgcagatgaatacagtctttcaaacgtactccttcgttaaaagccttaaaggagatatgttctataaaggagattccgtctatctgtatattgttgactttggctccgaattcaacggatttggtttccttgcctctgataatggggcgaaggtaatgccggtcgatactcacgatacggttggacacttttttgcctgcaaataaattcttcccttgctcaaggactgtctgtatgaccgagaaacgtctttggtaatcagaggatagtgcaagcctgttcctgtaggatgaatgaagctgctccagctggtcaagtaacttttccaataattgaagtaaccttcgtgtaatcatacgagtctgtgatttcctgcgtttacgcagtttgctataagcaagataggcacggcgtacatcaagatacttgttacggggacgttgtatgtgcaatgtacggcaatgtttgcacagatgacgatgaagccatacaataccttcccataagagtttggcatcagtaggaaaacgcaggtgactttcataacaggtggcatcggtcatacagacatgaaggttctcaagataaggtttccaatgctcggcaagaatgaactggagggactcaacatcaaggcgattcgctagttcctgacgaattgcactaacgattttaggattggttagtggatgaagcggatcaatctggacaccacaaaacaactggtaatgaatattaccgtttaaatgctcaatcagttgtgcatcggaaaagttggtataggacttcaagaccatcaaggctattttaccttcgggagaaaaataacttttacgacccaaagcagaggacttcaaatgcatttgtcgggccagttccgagaaagggaatagagaatggagtcgacctaattcactcgttgcaaaactttgacgatattttttaagcatatcgaactcggtaaaacctaaacaaggttcgatttctgagattttttgtatctttaccatgtgtttttattttagattacccccgttttggccgtcaaaccgttttttggggggaatgcttaaagatacaaaaaaggcaactaattcgcaatgaagtagttgccttaaattttattattttaggaatatccctacaaaatccatttaaacataaaaaagaaggccactaaggaagcgaccttctttactaatctcatatggagaaagaattattacttcatcatcttatcaatttcttcaaattccggtcccatattcaagttataataaacacggtaaagtccttgcaaccacaaatctttctggtctggtttcaaagcacgggctttctcataaaaaggcttagcttcttcatagaacttctttactacagcctgtgcttcagcatacttaggatcattaatatccgtcgttgctttatcagcataatcctgcgctttcatcaaatacactaaacctacattagagtatgcttctgcatattccggatcagcagcaatagcctttttatagaattcaattgcattatcatattctttcatgttatgataaagatatgcctttacatataaatacagcttattattcggatcattagacagcattctgtcagcaaactccatagccttagaggcttgattagaactattataataatcaaccaaattggcaaagaaataatcatttcctggaaatttaagaataccttcttccagagctttgatccatgctactgtgtcccccttagctttataagcatcagccattaattgcattgcaaacttgccaccatctttatctgacaaagccatcggagcatacttgataatcgcatctttattacctactctatcagctgccaatgttgcataataagcaatctgcggaagaagagtatcgtttttagcaatctctttatcagctaacataggatatgaagctgactctacgtatgttgcgaagaatttcaacgcttctttattcttatccaaattaaaatattgaataccaccattgatcaaattcggacgttcggccaacatactagaagcattcgccttccgatatttgtttttaattttgcccttttcattgggtacttgagccagatcgtcacacttagtataatactcatacatcttcaatatgctattatacactttcaatgtatcatacggttttctcaaaaaagcatttttcatctgctcttcgttgatacgtttctggataaatccagcaacatcccatgtttcagcaagatcctttgtttcaggattcttcatagcttccttaataagctgttcagcctgcttaaaattaggttttacgtcattagctatgctcttcgcttcttttacatttttcatttgagcaaaagagaagctaacagccatcaataaaaccatagaaaataatactcttttcatgattgttgtttgattaattattaatattatgtctattcctcaatgttattactttcgttctcatttacatctgacgtatcatcattgtcaatatcaggagcatcagtattaggatcactcacaatagtaccctctacttcttcttccggtatttcatcctcaagactttcagtcatgactttacatactgaaccaatctgatcattgcgtttttcaagattaatcaaacggacaccttgggtagcacgccccatgatacgaacatctgctaccttcaaacgaattgtgataccggatttattgataatcatcaaatcattttcatctgttacagatttaatcgttaccaatttacccgttttttcagtaatattcattgttttcacacccttacctccacggttggtcttacgatagtcttcaatttcagaacgtttaccatatccttgctcagaaacaaccattacagattccgtctccaagtccttaatgcaaatcattcccacaacttcatcctgaccatcgttatctaatgtaataccacgcacccccgttgctgtacgtcccataacacgcactgctgcttcatggaaacgaattgcacgtccattacggttggcaatgataatttcattatttccattcgtcatacgaacttcgataacactgtcatcttcgcgaatcgtaatagcatttacaccattctggcgaggacgagaatattgttctaacaatgttttctttattacacctttcttagtacagaataatacatagtggctattgatgaactctgaatcctctaaactcttcacacgcaaatatgccgttacattatcatctgaatcaatattcaacaaattctgaatagcacgccccttagagttcttcgttccttcaggtatctcatacactttcaaccaataacacttacctttttgtgtaaagaacatcatggtattgtgcatggtagccggataaatatgctctacaaagtcttcatcacgagtttctgttcccttagaacctaccccaccacgattctgtgcgcgaaattctgttaaaggagtacgcttgatatatcccatatgagaaatggtgataatcatttggtcatcagcgtagaaatcttccggattaaactcttctgaagaatatacaatctctgaacggcgttcatccccatattttgctttcacttccagcagttcatctttcattaccttacggcatacttcatcatcagccagaatactttccaaataagcaatctgcttcatgatttcctcgtattccgcatgaagctgatcctgcatcaaaccagtcaactggcgcaaacgcatttctacaatagcacgcgactgaatttctgtcaggttgaaacgttctatcaagcctgctatagcatcattgggcgttttagcagcacggataatacgaattacttcatcaatattatccgaagcaataattaaaccttcaagaatatgtgcccgctcttttgctttacgaagttcgaactgagtacgacgaattacgacctcgcgtctatgttctatgaaatattttattaaatctctcagatttaatgtctttggacgtccgtgtatcaaagcaacattattcacaccaaaagatgtctgtaaagctgtcatcttataaagtttattcagcactacacttgcatttgcatcacgttttacgtcaataacgatacgcataccatcacggtcagactcatcattagcattcgagatgccttctattttcttatcgttaacaaggtcagcgatatacttaatcaattctgccttatttacattatagggaatctcggtgattacaattttatcatgtgcctgcccgctttcaatttcagctctcgcacgcataactacacgtccacgacctgtcagataagcctcacgcacaccacttacaccatatatatatccgcctgtaggaaaatccggagctttcacaaactccatcaactcttccactgtaatttccggattatcaatatatgcatcacaagcatctataacttcagaaagattatgtggaggcatattggtagccatacccacggcaataccagatgcaccattcactaaaagattaggaattcgagttggcataaccttaggttcaaccaaagtattatcaaagttaggctcaaaatctacggtttccttatacaagtcatccatcatcgcttcacccagcttattaagacgtgcctccgtataacgcatagcagcagggctatcaccgtctaccgaaccaaaattaccctgtccgtctaccaaaggataacgcatcgcccactcctgagccatacgaaccattgcaagataaacagaaaaatctccatgaggatgatacttaccaagtacttcaccaacaattctggctgatttcttataaggtttatctgaagtattacccaattccatcattccgtataaaattctacggtgaacgggcttaaatccatctctaacatccggaagggcacgcgaaacgatgaccgacatagagtagtcaatgtacgatgacttcatttcctcctcgatgttaatctttataattctgtcttgttcaagcatttaaaatgattattaattatacattctacggtttgtaaaaaaccacgctaaagtactacttttcccggatatacgaaagtttttggaaagaaagttttattatgaacagaatgatacccaactaagctttaaaatacgaaaacaaaaagagaaaaataataaattaggctataaaggctatggaatatcggcaaaaagcatccagccatttgttataccttattatatataatgcaaatgtagcatttttatggcacgccatttgtagatataagaaataaagcaaatattgcaatacaaacttgatttaatgcgtatatttgcgagtgaataacccttagaaaagaaggaagaaagtatgaataatcaattctcacaaagagtttccgacattatcgtctatagtaaagaagaagcgaatcggttgagaagtaggtacataggtccagaacacctgcttttgggtatgctccgtgacggtgaaggaaaagctatcgagatattgtctaaactcaatcccaatctgactgccatcaaacagcagattgaagctcagctaaaggtagaagctgatgatatgttattacctgacgtagaagtgtcgttgtctaatgacgcggcaaaaatattaaaaatgtgtattttagaagcacgtggaatgaaaagtaacatcgctgacacagaacatgttctgttggcaattttaagagaaaaaaagaatgtagcagcctccatacttgaagcaaataacatcaattacgcaaaagtattggaacaggtgacattgcagccagacataaatgctggaatgtttactgaagatgacgatgaagatgaagaaatgtcttccccccgctcaagcggaagaggcaatactgaagagcgtcaacaggcacaaacagcttcgaaaaagccatctaatgacacaccggtacttgacaatttcggtacggatatgacaaaagcggcagaagaaggaaaattagatccagtagtcggcagagaaaaagaaattgaacgtttggcccaaatcttaagccgccgtaaaaaaaacaaccctattctaataggtgaaccgggtgtagggaaatcagctattgttgagggacttgctttaagaattactcagaaaaaggtttcacgaattttgtttgataaacgagttgtggctctggatatgacagctgtcgtagcgggtaccaaatatcgcggacaatttgaagagcgtattcgttccattctaaatgagttacagaagaatcccaatataattctgtttgtcgatgagattcacacaattgtaggtgcagggtcggctgcaggctctatggacgctgcgaatatgttaaaaccggcattggctagaggagaaatacaatgtattggcgctaccacccttgatgagtaccgtaagaatattgaaaaagacggtgctcttgaacgtcgtttccaaaaagtaatagtagaaccaactacagctgaggaaactcttcaaattttacataacatcaaggacaagtatgaagaccatcataatgttttttatactgatgaagcattggaagcatgtgtcaagctgacagaccgctatatcacagatcgcaatttccctgataaggctattgatgctttggatgaagccggttcacgggtacatcttactaacattaatgttcctaaagagatagaagagcaggaaaaattgatcgaagaagctaaaagtaagaaaaatgaagcagttaaatctcagaactttgaacttgcagccagttttcgggataaagaaaaagaattctctcttcgattagacgagatgaaaaaagagtgggaagccagcctgaaggaaaataggcagaccgttgatgcagaagagatcgccaacgttatatcaatgatgtcaggtattcctgtacaacgtatggcacaagccgaaggtgttaagctagccggcatgaaagaagatctgcaatctaaagtcatagcgcaagatacggccatagaaaagttggtaaaagcaatattgcgaagccgtgtaggattaaaagatcccaataaaccaattggcacattcatgtttttaggtccaacgggggttggtaagacccatttagccaaagaattagccaaatatatgtttggttcagccgatgcactgattcgtatagacatgagtgagtatatggagaaatttacggtttcacgactggtcggagcacctccgggatacgtaggatatgaagaagggggacaattaacagaaaaagtacgccgcaaaccatattctattgtattgcttgatgaaatagaaaaagcgcatccggatgtattcaatatcttgcttcaagtaatggatgaaggacgtctgactgacagttatggcaggatggtagactttaaaaatactgttatcatcatgacctccaatatcggaacccgtcagttgaaagaatttggacgaggggtcggatttgcaacacaaagccgccttgacgacaaagaattctcgcgaagtgtaatccaaaaagctttaaataaatcattcgctcctgaatttattaatcgagtagatgaaattatcacattcgaccagctctctctggaagcaattacaaagattattgatatagagctgaaaggattatataatagaattgaatctattggatataaattaattatcgaagataaagcgaaagagttcatagcaaccaaaggatacgatgtgcagtatggtgcccgtcctttaaaacgagctattcaaacctatttggaagacgggttatcagaactcatcatttcttcgtctttaaaagaaaaagacatcattcaagtctctcttaatggagaaaagggtgaattagaaatgaaagctattactcaagaataagattatattgtccatgtttggaatcaatattaagtatgtcataatgtcagaccttcgggtctggcattttttttgtctctacctgagtaagtatcaattaaaattaatcaatagataaactaaaaaatatacgtattatgcagaaaggtaatattggagttacaacagagaacatttttcctattatcaaaaagttcttgtatagtgaccatgagatttttcttcgtgagttagtatccaatgcagtagacgctactcagaagctgaatacactagcttctatcggagagtttaaaggtgagttaggtgatttaaccattcatgttgaattaggcaaagatactattaccatttccgatcgcggtattggtctgactgcagaagaaatcgaaaagtatatcaatcagattgcattctctggagcaaatgatttcctcgagaaatacaaaaatgacgcaaatgccatcattggtcatttcggattaggtttctattctgcttttatggttgcaaagaaagtagaaataatcactaagtcatataaagacggcgcacaagctgtaaaatggacttgcgacggtagtcctgaatttacaattgaagaagtggaaaaagcagatcgaggctcggatatcatcttgtacattgatgatgactgcaaggaatttcttgaagaagcccgcatctccggacttttgaagaaatattgcagtttccttcctgttcctattgcatttgggaagaaaaaagaatggaaagatggcaaacagatagatacagccgaagataatatcatcaatgatacaactcccctatggactcgcaaacctagcgaactatcggatgaagattacaaatcattctatagtaagttgtatccgatgtctgacgaaccacttttctggattcatctgaatgtcgactacccattccatttgactggaattctttatttcccgaaagtaaaaagcaatattgaactaaataaaaacaaaattcaattatattgcaatcaggtatatgttacagattctgttgaaggtattgtgccggacttcttgacactgttgcatggagtgatagattctccagacattccgttgaatgtttcccggtcatatttacagagtgattcaaacgtgaagaaaatctcaacctatatcacaaagaaagtttccgaccgtctgcaatccatcttcaagaatgatcgcaaacaatttgaagaaaagtggaatgatttaaaaatatttatcaattatggaatgctcacacaagaggacttctatgataaagcgcaaaaatttgcccttttcaccgatacaaatgacaagcattacacattcgaagaataccagactcttattaaagataatcaaacagataaagatggaaatctgatctatctgtatgctaacaacaaagatgaacaatatagttacattgaagctgccaccaataaaggatacaatgttttgcttatggatggccagttagacgtagctatgataagcatgttggaacaaaagctggagaagtctcgctttacccgtgttgatagtgatgttatcgacaatcttatcgttaaagaagataagaaaggcgaaatattggaagcagacaagcaagatgctatcacaacagccttcaaaagtcaacttcctaaaatggataaagtcgagtttaatgtcatgacacaagcattgggagaaaattctgctccggtaatgattactcaaagcgaatatatgcgtcgtatgaaagaaatggcaaacatacaagccggaatgagtttctatggcgaaatgcctgatatgttcaatttaatactgaattccgaccacaaactgataaaacaagtattaaatgaagaagaaggagcttgccatgcagaggtaaccccgatacaatctgaaatggatagcatcaacaaaaaacgcaatgagttgaaagataagcagaaaggtaagaaagatgaagatatcccaacagctgaaaaagatgaactaaatgatttagataagaaatgggatgatctgaagagtaagaaagaagctatcttcgcaggttatgccagcaataataaagttatccgtcaactgattgacttagctttattgcaaaataatatgttaagaggtgaagcattgaacaacttcgtaaaacgtagcattgagctgatttaacatcgccccttttaaacattacataactttcaaaagagcattcaacgttaaattcacgttgtaatgctctttttcactttaaaacaagtggcaaaatatcgataaattgaaaagtattgcatatatttgaacacttaatagacagaaatatcaattgcttgacttgggttatgagaaaaattctttttgtgttaattactttatggctgactattccggctatccatgcccaaaaagtaggattagtattaagcggcggcggtgcaaaaggattaacgcatattggtattatccgcgctttagaagaaaacaatatacctattgattatattgcaggtacctctatgggggccatcatcggctccttatatgctatgggatattctcccgatgatatggtggaactgttaaagtctgaagacttcaaacgatggtattccggagaagtggaagaaaagtatgtatatcatttcaagaaaaatctcccgactcctgaattctttaatattcgtttttcattcaaagactcgctaaagaacctgaaaccacagtttcttcccaccagcgtagtgaatccgattcagatgaatctcgtttttgttgatctgtacgcacgtgctacagctgcatgtaaaggagattttgataagctcttcgttcctttccgttgtattgcgtccgatgtatataacaagcagcaattgataatgagaaacggagatctaggagatgcggtcagagcttcaatgagctttccattcatgttcaagcctattgaaataaacaatgtgttagcttatgatggagggatttacaacaatttccctacagatgtcatgaaagatgattttcatcctgacattattataggaagcattgtatctaccaatcccaccaagcctaaagaagatgaccttatgagtcagatagaaaatatggtaatgcaaaaaaccgactattccattcccgattctgtaggaatatctatgactttcaaatatgacaatgtcaatttgatggatttccaacgcattgacgaactgcatgatataggatataatcgcactatcagcatgatggactcgctcaagagtcgcattcaccgacgtgtaaacgcagacaatatacgtttaagaagaatggtgtataaaagcaattttcccgaattacgctttaaaaatattattattgatggcgccaatccccaacaacaagcctacataaaaagagaatttcataaatcggacaataaagaattcacctatgaggatttaaaacaaggctattttcgactgctttcagacaaaatgatttctgaaatcattcctcatgcgatttacaatccggaagatgatacttacgacctgcatttaaaagtcaaactagagaataattttgcagtaagattgggtgggaatatatctacttccaactccaatcagatttatctaggactgagttatcaggatttgaattactatgctaaagaatttgttcttgatggacaacttggaaagatctataacaatatccaatttatggcaaagatagatttcgccacagctatacctacgtcatatcgtctcataggttcaatcagcactttcgattatttcaaaaaggacaagcttttttctagaaatgacaagccggcttttaaccaaaaagacgaacgctttttaaagttacaagtaggcttaccttttctttcaagtaaacgagctgaattcggcataggaatcgcaaaaatagaagataaatattttcagaaaaacatcatagatttcgggaatgacaaatacgacaaaagccgttataatttattagggggatccattagctttaatggaagcacccttaatgcccgccaatatcccacacgtggatacagagaagctcttgtagcccaaatttttgttggaagagaacgattctatcctggtgaagggacaactagcgataatagtaataggaaacaccactcttggctgcaattatcctatatgaaggaaaaataccataatatgagtgagcattgggttctgggctggtatttgaaagcattatatgcctccaaaaacttttctgagaattatacagcaacaatgatgcaagctggagaattctctcccacattacatagtaaaatgacatataatgaagctttccgtgccaatcagtttgtaggtgtcggcattcggccggtctaccgtttaaatcaaatgttccatcttcgaggagaattctatggatttatgccgatttatccgattgagaaaaactcactaaataaagcatactatggaaaagcgttttctaaattcgaatatctaggagaaatttctgtggtatgccaattacctttcggagacatctctgcgtatgtaaatcattatagttcaccaagaaaagagtggaatgtggggttaagcataggtttgcaactgtttaattatcggtttatagaataatttttctacaaaaaagtcgttgaaaagcttgctagttcgggaaaagtccgtatctttgcacccgttaaaacaaaataatggtcgcgtagctcaactgaatagagtagctgactacggatcagccggttacaggtttgaatcctgtcgcgatcactttttgaattaacagaatggccgcgtagctcaactgaatagagtagctgactacggatcagccggttacaggtttgaatcctgtcgcggtcacaaacaattttacttataaaaggtcgcgtagctcaactgaatagagtagctgactacggatcagccggttacaggtttgaatcctgtcgcgatcacgaatcctctgcatttcatgtggaggatttctttttttgccccattttatcgaaaaaaatcacccttcaccttcatccaactattgataatagagaatgaaaaggtgaagggcgaacctttgttagataaatatatcagaaattgataatatctcctgtaatcagcatttaatattcagctcattcaaaactttacgaatagcttcaaacgtagtaatgcgcgtaggtactagtggcaaccgaagtttattttcaatcattcccattgcattcaacattgatttcacaccggccggattcccatctacaaataatagattaaacaattctgtaaatctatgatggatagccagcgcgttagcaaagtctccttgaagagccaagcgagtcatacggctaaactcacggggaaaagcatttcctattaccgaaataacgccaacagctcctaaagtaataagagggaaagtgatgccatcatctccggatataacattaaaattctcaggtttatttttaatgatatcatccatctgtgtaatattaccggaggcttcttttatagcaatcacattactgaagttacgtgcgatacgcaaagtcgtttcagcagtcatattcacacctgtacgtcccggaacattatacaacacaataggaagttccgttgcttcggcaatagccttataatgctgataaataccttcttgagaaggcttgttataatatggcacaacagacaatatagcgtcgactcctgtgaaatcatcattcttcaatgtctccacaacagcccgagtgttattaccacctacacctaacagaatagggactcttccgttaacgcggtcaatcaccatttttttaatagttttcttttcttcctcagtaagagtcggcgtttcagccgtagttcccagcacacacaggaaatccgcattattctgtaataaatagtctaccatacgcattagcgcgtcatagtcaacactctcatcctctttgaaaggagtaatcagtgctacccccattcctttcaatttagtctgtatcatgagttttaattataatctctaatttatttagccacaaaagtacgaatatttttcatatcttacgatataagtttcagaaattcgtcttcgcttaatatggttattcctaatttttgcgctttttccaactttgcaggtcccatattatctccagcaagaataaaacttgtttttgcggaaatacttcccacatttttccctccgtttttctcaataagttctttatattcgtcacgcgaatggtggataaatacaccgctgataacaatagactgtcccgctaacttatcagtatacccactcaaatcttcttcagtacgataaaactgcagcccagcctctttcaacctgttcaccaactcgcaattagcctcatttgcaaaatacgtaagaatactttgggctattttctcaccgatttcatcgatacttactaatctttcaagatccgcccgtttcaactcatctatattttcaaacgacttcgcaatcttttttgcaactgtttcacccacaaagcggattcccagagcaaaaataacacgttcgaaaggaactgctttgctctgggcaattcctgttacaatattctcagctgatttttcccccatacgctccaatcctttaatgtcgtctattgtgagtttatacaaatcagcggtattatgaattaaacctaagcgataaaacatatcaaccgtctccggacctaaaccatcgatatccatagctttccgactaataaaatgctctatcttacctttaatctgaggagggcaagccgtttcattaggacagtaatgagcagcttccccttcatacctgactaatttactgccacattcaggacaagtagtgatgaacctgaccttctcaccaaccataaaactacgtgcatctacatccacacccgtgattttaggaataatctcaccacctttttccacataaaccatatctccaatgtgcaaatcaagtccttcgattatatcagcattatgtaaggatgcacgtttcacgacagttcccgagagctgtaccggatccaaattagccacaggagtaacagcccccgttctaccgacttgataagtcactttattcaaacgagtcaaagcccgctccgcctggaacttgtaagcaatagcccatctgggagatttagccgtaaaccccaaattcttttgctgcctcaagctatttacctttaacacaatcccatccgtagcaaccggtaagtttttacgttctacatcccaataatttataaattcaaaaacctcctctaatgtttgacatttacgcattagatcagatattttaaagccccattttgccgcttcctgaagattttcgtaatgtccgtcgcaaggcagattatttcctaaaagataatataaatacgcatccagtttacgggaagcgacaactgaagaattttgcaacttcaatgttccggaagctgcatttcttggattagcaaaaagtggttcctcacgggcctccttttctcgattcaatgcttcaaatacttcccacggcataagaatctccccacgaatttcaaatgaggcaggatagttgtcaccgtgaagtacaagcggaatagaacgaatcgttttcacattatccgtcacatcatcacctttctcgccatctccacgagtaaccgcccgaactaattttccatcctcataagtcaatgagattgatgttccgtcatatttcatctcacagcaaatctcaaaatcttcattaagagccttacggacacgttcatagaaatcggtgacttcctcctccgaatatgtgttcgccaatgataacataggatatttatgtgctacctgcgtaaagttcttgttcaaatcactacccacacgcatagtaggcgaattctcatctttatattccgggtgagcctcctccaaatcctggagttcacgcatcttgtcatcaaactccttatccgatatttcaggagcattcaacacgtaataattatagttatgccgatgaagttcagcacgcaattcctctatttttccttttatatccatatttctttgattgtttaaggcaaaaatacgggtttatctttgaatatttgtacttttgcgaaaaattaaagattatgcgtattgatattataacggttttgcccgaaatgattgagggattcttcaattgttccattatgaaacgggctcagaacaaaggacttgcagaaatccatattcacaatctgcgtgactacactgaagataaataccgccgtgtcgatgattatccttttggcggctttgccggaatggtcatgaaaatagagcctatcgagcgttgcatcaatgctctcaaagcggagcgagagtacgatgaagtaatcttcacaacccccgacggagaacaattcaaccagcctatggccaacaatctgtctttagcacagaatcttattatcctttgtggacatttcaaaggaattgactatcgtatccgcgagcacctgatcactaaagaaatcagtatcggagattacgtcctgacaggtggcgaattagctgcggcagtcatggccgacgctattgtacgcatcattccgggagtcatctccgatgaacaatctgcactttccgattctttccaagataatttgctggcagcacctgtatatactcgtcctgccgactataaaggctggaaagttcccgagattcttttatccggtcatgaagccaagattaaagaatgggaactgcaacaatctttggagcgcaccaagaaacttcgtcccgacttgctggaagaataaaaacgatatgtaaataaaaacgacagcaggaaataagttatttcctgctgtcgtttttattatatcctccgcttggagattttagctctcactcttcacactaaacacaaacatcttattcgttcgccatttcatattcaatttcacagatcaaaacttgaaggtagaataacatttttctcatatatttagtgcgaatagttattgtatgtttgcagttatacctcaagcgcacctataatttccttcacagacttatatccatgtctatctaagtaattatttataccatcttccactttgatggtaacagccggatctatgaaatttgccgtaccgatctggatagcagatgcacccgcaagcatgaattcaaccgcatctttccaatccataatcccgcctaatcctatgacaggaatatttaccactttagcaacttgccataccatacgtaatgcgataggttttacggcggctccggacattccacccgttatagtggataaaatgggacgtctacgctccgcatcgattgccattcccaataatgtattgattaatgatacactatctgcaccactttcttccgctgcacgagctatttcagtgatatctgtgacgtttggagagagttttacgataagtgtctttttgtaagcagaacgtactgctttcactacttctgacgcaccttttgctgacacaccaaaagccataccaccttgctttacattggggcaggaaatatttaactctatagcaggaattttgtcaagttcattaataatttcggctgttttcacataatcttcgatagtagaacccgaaaggtttacaatcatattcgtttctatgtcttttatgcgaggatatatatgttctacaaagtactcaacgcccttattttgcagtcccacagcgtttaacatccccgaaggagtctcagccatacgtggataaggattcccttcacgtttgtgaagagtagtaccctttacgataataccacctattcgcgctatatcaatgaagtcagagaactcttcaccgtatccaaatgtaccggatgctgtcatcaccggattcttcattttcaattcgccaatatttacatttaaatctgccataatagtttctttatattaaaaacaggaccttctttgcatacacacaagtgaccttctgtcgtattttccacacaacataaacatgcaccgataccacaagccatcgtattttccaaagagacttcacattctatctgattacttttggcatattttgccacagccatcatcataggtttgggaccacaagtgtaaatctgctcaaattgtactttgcctaatatagaatgttgagtaacatatcccttttctccgtaactaccatcttcagtagtagtgtacacctcaccatatttagcgaattcttccaactgcaaaagatccttatcactacgggcgcctaaaagaaaagtaggtttatgaccgtttttagccaattgctcacccaaaaacaacataggagctgttccgacacctccacccactagcaggagcttatcagaagcattgtgaggcattgtgtagccatttcctaacggaagtaccgtattaatcacatcgcctgattttacctctgccaaacgccttgtaccatctccgactaactggatcagaaaccatacttcatttcgttgtttatctacaaagttaatagaaataggacgacgcaagaatgtagtaggcgaaccgtccacccggagttcggcaaactgcccaggcaacatttcgggcaacaacgatggagatgtcaattttagcaatacataattagtatgcaatttaatattctccgtaaccgtcagatctaaaataaattttttcatgtatggatataaaaagtataaattcgtattccgggtgcaaagatacaggaatttgctcaaacgagcgattttacctcttatttttcaggtctaaacgtttcataggtattatcatcaaagaaaattcttatttcagtgattttcctaacaggcttttctatatacctaatttcctgttttacaacccctttagctacattttcagtgcctcttaatgcaatttccttgcgattttccaggccaatcgtctctttggtcgaatttacaggattctcgtcaaacaaagaaggttgataatctccattagaagataccaatgaagcactttctgcagaagcaagcatttcaccttttccatataatagccattcgagatttacatagctataagtctggtgaactttcatgactacttctagactcggtttatttctatcatttaaaatatgagaaagagtagactgctgaacaccgattgtctcggcaaaaactctggggggaaccttttccctttccataatcattctaattctgtcttttatttccatactgcctttattgaaagttataattccacgcactaaatgatgttttcacaaaaatatatcaaagtttaaatgcaatacaaaagtaattatttaaattcacaaaagcaaattacaactataaaatacaaatattacaaagttatatcatcattcacatttgaaatattacgattgtacacatagataaaagaacctatttatatatcatagttattatttaataaatacatattactatctgataataaacaaattacataaaacaatagtgggtaaaaacagtgatattcacaaaaataaatgccacataaagttctaatttacagttcaaaatcaaataacggtatatatataactgatatttaatgatataacatacctataaataactattaatcactctcctactacatttatactaaatactctatctttgtaaactatctattttacatttatacaaccagctactaaagtacaaatgtattgcattcacaagggtattaattacaaatatataacacgaaatacacaagcgtaaatagaagaagttgcacttacaataaaataaagaaaaaaagctattattcacgaatgtatattatggtttcttcaaatcatatttgacattctaacataaaataccaaatccttgcaatatttccgtccattagcccatttcgatgtttttttcaattctagaaaggtataattctgcataatacattgttatacaaatatttacttcaaattttatgactctgttttttagttcaaatagagaaaagcaagaaaatcaccactattaatctccaaactatcaaaatgatatttaaagcaagataggaattcaaatttttctgtgaagtttcttgtgaagagaaaaacacctattcgatggaagaatgatattggggacaccaccgaataaaattgagatgaatgaataaacgaaaaattccaaaggatgaggaagtagccatgaaaagatgaggaaagtatgtagaaattattgttcgttttttttattcaaaatatagacttacaccgtccaaaagaaaacatatttcagaggatatagaaaagacatctactttattctatttatagtaaaagtagatgtcttttctttatataccaaaaacgctcctactaatgcaaaatattaaacactaattcgcgaagaatatctccatctgtcattgaactgttctttactccctttgactttgcatccgcatatcgtatttcaccaacgatttgcattgtctttacaccagtatattttctcatagcagctatataatctttagcctgccaagtcgttttcagtcctaacatattagcaactccctgctctgatttatcaggcgcataatatgccaacatcagattagaatagaagttgaacaacagtgacaaagttatctgtattggattcgttttcgggttttcctcaaaatattttattatcttatttgctttaaggatatccttttcaacaagtgcgctccgcaattcaaagttattataatccttgcttataccgatattcttttctatctgctcaggtgttacacgtctctgaccagcaggtaaagtgatgattagcttttccaattcccccgtcagtcggctcaaatcagaacctacaaaatcagccaacatggctgttgccttaggttccatatccacacctttacgcttcatataagaagatatgaaagcaggaagttgggcctcttttatttttttcgattcaaacaatacgcccaccttttcaatttcggctgctaacttctttctacgatccaacgtaccatgcttatggcatattaccaaaatagtagacaggagtggtttttgaagataataagacaactcttccatattgcggattacctgcgcctcctttaccactaccacctgatgttcagacatcatcggataacgctttgctgcatttatgacagtagccacatctacatcggcaccatataccacggttagattgaattccttctccgtttcattcaacacattatttgttatataatccgcaatcaggtcgatataatacgattcttcccccatcaaataatagacaggacgatattgtttagcacccaactccttgagaatatcatcacacgtcagttcttgttttgccataatatctttcaagaccgggaattaccagtcaaatttcaagtgttttacagttttcttttcatcaataatcatgcgcaaagaggcaatacctatttccacatgttcttccacataatttttggtaaccaggctatcgctcttgtctgttttcaccccatccggagtcatcggttgatcggaaaccaacagcaatgcaccggtaggaatatgattggcaaagccacaactaaacaatgttgccgtttccatatcaactgccattgcgcgagtctttttcagatactccttgaatgtatcatcatgttcccaaatacgacgattcgtagtataaacagttcctgtccaatagtcacgtccatagtcacgaatcgatgaagaaacggcacgctgcaacataaatgcaggcaacgccggaacctcaggtggaaaatagtcattggaagttccctcgccacgaattgccgcaatgggaagaatcaaatctccaagatgattcttcttgtcgataccaccgcatttaccaagaaacagacaggccttcgggcggatagcacccagcaaatccataataatggcggcattaggactccccatgccaaaattaatcattgtaattcctccggcactggcagaaatcatattagcatccctacccaatattggaacatcaaattgattggcgaaaatctctacatacttgttgaagttagtcaacagtatatactctccaaaatcctccaagttacgttttgtgtaacgtggcagccaattagctacgatttcttcttttgttttcataatttcattaaatttgcggttccaaataaaggaacccgttatttaacttacaaaaataataaatgttatcgttaaacctaccagtattcgacactaaaataaacgtacgaaacggaaaaaatgtaatttttgacgtaattcgcaaacgatatgtcgcccttactcccgaagaatgggtacggcaacactttgtacactttcttattgcacacaaaggatacccatccgctctattagctaacgaagtaatggtaaagctgaacggtacaactaaaagatgcgatacagtactctaccggagagacctctccgcccggatgattgtggagtataaagctccccatgtagaaatcacgcaagccgttttcgatcagattacccgatacaatatggtactgaaagtagattacctgattgtcagcaacggaatgcagcactattgctgccgcatggattatgaaaatcagagctatacttttctgagagatattccggactatgcttctttataaatcgatcattacatgaaacctacgggatgattatatcatcccgccaccttctttttcccaccgaatttttcttgcaatttctgcatcagctcatagaaattaggtacataaaccgtagccagcaacgtattcattgccataccgaataccactgcagcccccagtgcgatacgactttccgcacctgcaccggtagcaaacagcaacggcattactcccaaaacgaaagcaaatgatgtcattaagatcggtcgcagacgaacatgtcccgcttcaaatgccgcatcacggatcgaattcccctcagcgcggaaatcacgggcaaactccacaatcagaattccgttctttgccgaaagcgcaatcaacaggataataccaatctgcgtataaatacttaccggagtccccattatcagacaaccgatcatcgctcccaacaatgctaccggcaaaccaataaccgccgctaccggactggtccaactttcgtactgcgcagccaacactagaaatgcgacaatcaaagccatgaccagaacaatggtcgttgtattcccagcctgcgtttcctggtatgcaacagaagtccattcatacccgaattcatcacctaactgttccttgaacaaagcctccatctcttgaatagcctgccccgtactgcttcccggagccacattgcaggtcaaagccgcagtagaatacatattataccggttaatctgatcttgccccaactgttcttctactttagtaaaagaagagaaaggtaccatctctcccgcagaattcggcacactcaatttcagcacatcatcgatcaccctttgcgcctgatcacgcgcctcgatcttcacctgatagatacgtccgaactctacaaaatcattcacatacgccgctcccatataatatcctaacgtagaaaagacatcattcaaggcaatacccataaattgaactttatcccgatcgatattcaaaaaatactgcggtacatttgcttgatactggctggatatagaagccagagcaggtttggtatggtaagaagccaataaagcatcgatagcctgctgcatctccgtagatcccaggtttttcctatcctctacctgaagctgcagacctcccgaagcccctaatcctggaatagccggtggaaccatagcaaacacctgcccggcttggattgtcatatacgcctcaccgttgaaacggttgactacagcggcagccgtatgctccttccctttcctttcgttccagtttttcagtacgacaaaataagtagccgaattactctgctcaccacctcccataacggaaaaaccggtaatacctatatagttctgtacctcaggatacgaatcaagtatggcattaatttgatttccaaccgcttgtgtacgctccagactggcagcaggaggcaattgaaccacagcaatgaaatatccgtcatcttcatcgggaacgaacgtagaaggccagcgcataaatagaagaacagcaataactgtcaaaatggtataagaaataaaactaaatcccggtcgtttaagcagccatttaacgattccgtcatatactccctgcgttttatcataagccttattgaatccccgatagataaaaaatttggaaggtttgctcttttcaagaaaaagcgcgcaaagcgcaggtgtcaacgtcaatgaattaaaaccgctcaacacggtcgaagcagcaatagtcaacgcaaactgcttatatagctgaccggaaattccactaatcaacatagtaggaacaaatacggcaagcaacacaagaaccacaccgacaataggaccagtaatctctcccatcgcttttgtcaccgcttcgcgaggcgaatattgtccggtttccagtaacctcgaagcgttctccaccaccactatcgcatcatccaccacaatggcgattgccaaaatcaatccgaacaacgtcaatgtattgatagagaagccaaatgccgccatcacagcaagagtaccaatcaaagagaccggaatggtgagacaaggaataataaccgccctccaattctgaaggaacaagaaaataacaagcaccaccagcaaagtagtctcaaagaacgtcaccatcacctcatcaatggaagcatgaatcacatccgttgtatccaacgtaacgttataagtaacacctgacggaaagttctctcccaattcctccattttggctttcacccctttcgatacatccaatgagttggatcccggttgctgataaatagcaatggcagccgtaggtttcccattcagccgggataccactccataagaagcagaacccagatcaattcgtgcaatatctttcaggtgaagcattgctccgtccttttccgtacggatgatgatattgccaaactgttccggtgaggtaagtctcccctgcacattcaacgtatactgaaacgcattcttattatcctgtccgataggttgaccgatatacccggcagaaacctctacgttctgcgcctgaatggcctgatagacttgctgcggtgaaatattgcgaatccgcatagcttcaggatccagccagacacgcatagaataatctccggctcccatgacatttaccgcaccgactcccggcacacgggttaactggtcgacaagatttaatttcgcatagttggtaaggtacaaactgttatagacagaatcctgcgaagccattgtcaagaacataacgatgttcgaagattgtttctgtacagtcactccttgcaccaccaccggttccggaagtgatgattgcgcgatactcaccctgttttgcacttgcacagttgccatgtcaatatccgttccaacggcaaaagtgatagtcagagagtatgctcccgaagatgaagagttggaagacatataaagcataccatctactccattcacctgctgttcgataggaatacctaccgtttgggctaccgtctcggcatttgcacccggataaacggccgatacttgtaccgtcggtggtgtaatctccggaaattgcgctaccggcaatatatttagtgtcaccagaccggctaccacaataagcagtgcaagcaccgtagcgaagatcggtcggtttatgaaaaatttagaaaacatagatctataagtttaggattaatacttgaaatgaaagaactactctttaaggtacaggctttaccttcattccatctctgactttcatcagagcttccgtgacataccgctcttgaggagaaatgccctccaatacctgacgcagggtatcacccattaactgccccacctcaatatgacggtaacgaactacgttcgagtcatttacgacatacagaaatttacctaactgatccgttcctatagaagcttccttcaccaatacagcatttgaggcttcgccataaggaagagttatactcacatacaacccgcttttcagaagccctttcggattatcaaaattagcgcgtaccatcaatgttcccgtactcatatccacattcggggataaataatccaacacggcaggataagactccgttccatccttacccaattgtaccataatcttttgcggcaggttctttgccgattgattgtcattcatcgccatgcccaaccactgattgtccgctacattaaaatacgcatacatctgattatccttatagatagtagccaaagtaacgggctgtaaagatccgcccacataactccctatgtccacagtcgatttcgtgatagtcccgtcaaacggagcacgcacataacaatatcccagattcgtatgcgccgtactcaaagcggcttccgcattattcacagccgcgatcccttctgtcacattggcttccgactgtagcagttgtatctgactcaccgcatcacttttgatagcctctttcatacggctgtaattactgcgtgcgtactccagctgcgcctgagctgtttgcagatccgctttcgcctgttccaccttatccttatataatgtaggctcgatgacaaaaagtaactgtcctttctttacccttcctcccggagtataggaggtggactgcaaagtcccgtttactctggccacaagatttaccgtttgctccgttgtcaggtatcccgggtaatctttcgtcagagtaatgtccttcactatcggtttagtcacgctaatttcaggagtaggcattcctcccattgctcctgtgcttttcttctccttgcatcctgtcaatatgggcagcgcaagaaagatatacattagttttttcatatccgttcggttatatttttttatagattcttttttattctctccagcctccgcccaatgctttataaagggttatcagttgcaataatgaactgccttccgcttgcaccagctgattctcataagatagcagagaacgttgggcgtcgagcacattctggaacggtgaaagcccctgtttataaagttctaaagaaagtttcaacgtctccacaccttgattgtgcacctccctcaacgccacaatctgcttgatggaattacgataagcattcatcgcattatccgtttcctgtacagcagtcagaaccgtttgattaaattgattgatcgtttcgtccaattgaacttttgccagtctggtggcatttaccaattgtcctccactgaagattgtccaactcaatgccggagcaatctcataagtcatgcttttactcttcaccagatcctttaaatcgcgggcagcatagccaaacgaacctttcagaaaaactttcggcaaccagtcggccttagaagctccgagtaacgctgcctgcgcattcacattccgttccgcactccgcacatcgggtcttctcaataataaatcgacaggcatacccactccgatcggttccatataatcgggtaaaatccccaccgtttccagcactgggcgaatctcctgaggatacattccaagcaaaacggccagtgtcgtgatatactggttgatacctgcttccaattgtggaatggaagctctcgtgctatacaaaaccgacttagcctgtgccacgtccaacttagccacaagtccggtgttataacgtacttccgtgattttcagcacttcttcctgcgaggcgacattcttcttcaccacctcaagctgctgctgaaattcccgtagattgatataagctgaggccacctcggccgccatagaaatcatcacccccgtatactcctctttacttgcagcaaaattctctttctgcgctttcacacgcttacggatactgccgaatacatccacttcccaactcatactgagtgatgcgccataataatgttccgtagattgaggagcggcactgatattaccgcttgcctcctcgcgagtccatccggcattcaatccgacagaagggaaaaagttactgcgctccatccagagattggcacgggcagcagatatgcggttaatagccatcgcaacagagaaattgcggtctaccgccaaagcgatcagagaatccagcttggtgtctcggaaagatttccaccaataatcatccacaggaagcgtctgttgaaatacttgtccactctcctcccattcatcaggaagaggcgccttcaggtaacagtttgcagtttgcccaaccgcagatacagtagaaagaaacataaagagcgatatgccccacattcgtatattcatatcagttcaggtttttatgaaatgatatgataacaaccaaaggtttggtttgtttattttgggtatgttaagaaagggagataaaaaaagccccgcatgatgcggagctttgaaatatataatcaaaaagcggtagattattctgcactttttcttctgatcgctcttttggttgttggtgcgggagcttcttcagccttatgttcaatctgtacaccagccaattccgggtcaatcatgatacgtccgcaatattcgcaaacgatcaccttcttacgagagcgaatatccaattgtctctgaggcggaatcttgttaaagcaaccaccgcacgcgtcacgttgtacatatacgatacccagtccgttacgagaatttttacgtatacgtttgaatgactgcaatagacgcggctcaattttagtttccagatctttggctttgtctctcaacttttcttcttcctgcttggtttcagagataatctcatccaactcgcccttcttctgttcaaggtctttttttctttcatccaagacctgttcgtttttcacaacttcaccctctttctcttctttgtctgcagaatactccttgattctcttctcacaaagctcgatctccaacgtctggaattcaatttcttttgtcaagaagtcatattcacggttgttgcgaacattgtcttgctgtgacttatatttttcaaccgaagccttagccgtttcaatctctaccttcttaccggcaatagcagctttcaattcatctacttcagctttaatcttatcgatacgagtactcaaaccggcaatctcatcttcaaggtcttgcacttccaacggaagttcacctctcaatgttttgatctcgtcaatcttagacaacatagtttgcagctggaacagtgtcttcagtttctgttctaccgtcaactcattcggatctttttttgcttctctagccattttacttataaatattttatgggattcgtatttattttactcgattggagtgcaaaatttggaaataaatcccggattatagaataaaaaatttcttttgtatattgttcgctttcataatgaccgatttccgccatcagaatatcgccctcatgaccaaaataatcatgatatttaatttcacccgtgataaagacatccgcacctgcccggatggcctgtggaagcaaaaaagctcctgcgccaccacacaacgctactttctgtatctccctgcctgtcagtctattatgacggacacagcctacctcaaaagttttctttatacgtttcaggaattcaagctctgtttcaggttcatccaattcgcccacaatacccgcacctgcctgcgtcaagtcgtcttgcaggctgttctctttcggttcgagcacttgcagattcttcaaacctattttttcagctatcttatagttaactcccccgtatgcattatccagattagtatgcgctgaatagatcacaatatcattctttattgccttcagtatgcaacgttccacataatctttgcccgtaatggatttatagcctttgaaaatgagcggatgatgtgatataacgagattgtaccccaatgcgatagcttcatccagcactgcttcggtaacgtcaagacacaacaaagcccctgttgcttccacttctgtcaatccgatttgcaggccggcattatcaaatccgtcttgcaatggcagaggcgcgaatcgttcaagggcgcttactatttccttaattttcattattgatagaaaatttggtcgcaaagataataaattaaatagttatgcgcataacttcctcatcgtttttttcgtgtgactgtcatttcttggattctttagtcacttccaacagttttccgtacgcatcgaacgaacgtcgtgaagccaatgagatagtaatcatcaacgacaacatggatgcggcgaaagtaatcaccataatcatcatttgatatttgatagcgacattcgggctgcttccccccagaatctgcccgatcatcgtaccgggaaaagcaaccagacccatgaccgcgatattcgcaatcaaaggactgaaagatttaataatggcctgccggataaatggagcctgggcttcctgccttgtagccccattccccaataaataccgatacaattgttgttcacgtttcagcccgctataataggtattcaaagcgataacattgctcgacaacatattccccatcagaatgccgaatatcggaataaaatattgggcgctaaaaatattatccaattgaaggacaaccccgataaagtaaagccctattaacacaacactacagaaaaagccgaccgtaatggggattaacagaatacttcgtttcaactgggtacgtaccaatgcggtttgtccggctacaaatatcataacgaccacccaaaggaaattaataaaaggattattccataaaaagaggtatttcagatacataccgataagaaacagttggataatcatccgtaatgtgccaatcacagcaggttttagcagtcctgtcttgaatttccacagataaaagaatggaatggcaagcagaagcaaacctacaagaagattataatatgatatgtcaatcgttcccactatatagtttagtattccatctggttcttaattatagttctattacataatgacatcccgctgcaaagtctttgtcgtgagataccgccaacactgccgcccctctttctgcctgccgccgaaaaaaagacaatactttatcagtcgcccccgcatccaatgcagacgtcggttcgtcaatgataatcaacggtttattaagcattgcagccacagccaatgttatacgctggcgctgtccgccggatacctcattcactctctttgcatataattcgtgttccaagcccaattcgtcaaaacaagcgtataatctctcctccgaaaagggaacggaacgattcactttcagctcaaacggaagggtaaccatatctttcacccactcaaacggaagtgccaattcttggggaatccatgcaatctgtcgccggacgacatctatggtcgatatatccagcaacgtccctcccacttgaatggtcccttctcttaacggcacaaatcccatcaccgcattcaacaatgaagtttttccgcaaccggactgccccacgatacaagcggtttctccctgttccagattcagattaaaaccggagaaaagcacttctgccccaaaagcaatacaggcattattgatatgcaacatgactcatctttctaaaattctcatcaaaagtacataaaaaaacacgacttatgaatataaaaccccaataatatcgctagttatatattttgcagtctatagaagtaggtttactataccattattatcacatttctcagccattccggaaagcaataagagttgaagcgcacacaccttacatttcatacaaaagctaacggtaattcatatatcaattaacatacaatatattgtatatcaaccagtttgtcacattatcaaataaacattcaaaccgttctaccctagtgaacagatctgtttactagagtagacagtactgttcactatagtgcacgaaaccgttcactatagtggaacgattgaaatgcaagctaaataatccatcaatgatggctaaataatccgtcaatggcggctagataatccaacaatataagtagcttcacctataaacaaccgttagattgtaatgagagatatatgagaaatgcatgagagatgcatgaaaacaaaatatctctcattgcagtatattgctgataatatgaacattacatcaaatttatgagagatatgagagatgaaaaaatagatctctagtagtgcagaattccctaggattcatcaaatccaaaatgcgacactatttccttttatatcagtggttttttcaataacctttattatttaaacaaagcacttatacatctcttcgaataaaatattatctttgcctgactaattaattctagaaaagttatgatactaaacgaaagagacgctcgccatgagcacatactgcaagcagcacgccagataatgaccgccgcacgcactgcccccaaaggaaaagggatagatattattgaagtggcgctaattaccgatgaagaaatcaagcaattatcggacactatgataaagatggtggaagaacatggaatgaaattctttctacgggatgcagacaacatactaaatgccgaatgcgttatattaataggaacgcgcgagcaagcacagggactgaattgcggtcattgcggattctcaacttgtgccggacgtacagaaggtgttccatgtgccctgaatagtattgacgtgggtattgcgataggttctgcctgcgcaacagcagccgatctgcgtgtagacacacgggtaatgttctctgccggacttgcagcacaacgtctgaactggctgaaagactgcaaaatggtaatggcaattccggtaagcgcatcatcaaaaaatccgttcttcgaccggaagccaaaacaggagaacaaagattgatatcatactcgcaaaaaagaaatggatataaataactaaatagaaaagtctgatgggaatcatggttggattgcccagccctagcggctcggagaaagatttgcaattaaacttcggtaaaaatatgaccgtacaggtagaaatgagagcaccttatctgcctgctgaatggcatacgcaaagcggcatacaactgacgtggccgcacgctggtacggattgggcatatatgctggaagaagtacagcaatgtttcataaatatcgcccaagaaatagcaaaacgggaactgttactaatcgtcactcccgaacctgaaaaggtgaagcaacaaataactgctaccgtcaatatgaacaatgtacgctttctgcaatgtgccaccaacgacacttgggcacgtgaccacggagctataaccatgattgacacaggtactccctcattgctagacttcgcatttaacggctggggactaaaatatgcttccgaactggacaatcaaatcaccaggcaagctgtagaaaccggagctttaaacggccaatacgtcaaccggcttgatttcatactcgagggcggctctatcgagagcgatggaatgggcacactgctcaccacttccgaatgtctgctctcttccaaccgtaatgagcgtcttaaccaagtagagatagaagattatttaaaatcggttttccatctccagcaagtcctttggttggatcacggctaccttgcaggcgacgatactgacagtcatattgatactttagcccgtttctgctctaccgacaccatcgcctacgtgaaatgtgaagacaaagaggacgagcattatggagcgctacacgctatggaagaacaattaaaaacattccgcacattggccggagctccctatcgtctgttagctttacctatggcggacaagatagaagaagatggagagcgtcttcccgccacatacgctaattttctgattttaaatgacgccatcctctacccgacttacaatcagccgcaaaatgacaagaaagcaggtgaagtgttgcaacaagcatttccgggacggcaaatagtcggaatagattgtcgagccctaatcaaacagcatggttctttgcattgcgtcaccatgcaatatccaacaggagttataaaataaataattattcatcatgagaaaaataaaagtcggacttatccaacagtctaacacttcggacattcgtgtcaatctaatgaatctcgccaaaagcatagaagcgtgtgctgcgcacggcgcacagttaatcgtgcttcaggaattgcacaattcgctttacttctgccagacagaaaatacaaacctattcgacctagcagaaacgattcccggaccttccaccggattttactcggaattggcggcagccaataaggtagttcttgtaacttccctcttcgagaaacgcgcaccgggactttatcacaatacagccgttgtcttcgatcgtgacggaagcatcgccggtaaatatcggaaaatgcacattcccgacgatcctgcatattacgaaaagttttattttactcccggagatataggtttcgaaccgatccagacttctttaggaaaactgggagtcttggtatgctgggatcaatggtatccggaagctgcccgcctgatgacactgaaaggcgccgaacttctaatctatcctacagctatcggctgggaaagtagcgacacggatgacgagaaagcgcgtcaactcaacgcctggattatctcacaacgtgctcatgccgttgctaacggtcttcctgttatttccgtcaatcgtgtaggtcatgagcccgatccttccggacagacaaatggtatcttattttggggaaacagtttcgttgcgggtccgcaaggggaatttctcgcacaggccggaaatgaccgcccggagaatatggtagtggaaattgatatggaacgttctgagaatgtacgtcgctggtggccattcctgcgcgatcgtcgcatcgacgaatacgagggactgactaagcgattttattgaaaagtcagtttcttattagccatgaagttgacacctccgtaaataaacaatcccaagaattgtgcgaggtattcattcacgtctaatccttcaaccaataaaacaagaaacaggaattgtgccgtgtaggccagaccaaaagcagaacaaaagagcagtatctgtttccagatactgttctttttgttttctatagggaatatccagtatttacaccaaacgaagttatggatttgagcaatcagatacgctgttatattagccactatatagtcaccgttgaatgatatttccttcatcatcaaccatacaaccaatgccattatcaaggcattcatcgtaccgattaccataaaacgaaatatacgtaccgattctttcactcccaccctttgcttcactctttgatatcaacaatcaaattcagttcgtcaagttgagtctggtcaattgcagatggcgcatccagcatcacatcacgtccggaattgttcttcgggaacgcgatacagtcacggatagagtccagaccggcaaataaagacacccaacgatcaagcccgtatgcaagaccaccgtgaggcggtgcaccatacttaaaggcattcatcaggaagccgaactgcgcttccgccttttccggagtaaagcccagaatctcaaacatcttggcttgtagtttcgcatcgtgaatacggatagaacctccacctacttcgacaccattgactaccatatcgtatgcatcagcacgcactgcggccgggtcagtatccaacaatggaatatcttcatctttcggatgtgtgaaaggatgatgcattgccatcagacgaccttcttcctcgctccattcaaacatcgggaagtcaatcacccaaagacaaacgaatttattcttgtcacgcaagcccaattgagaacccatttccaaacgaagttcacaaagttgcttacgggttttcatggcatcgtcaccggaaagaattaaaatcaagtcacccggcttagctccgaacgcttccttcattttctgaagtacctcttgcgtatagaacttgtctacgcttgatttcacagtaccgtccgcttctatacgggcatagaccataccttttgcgccgatctgaggtttctttacaaactcagtcaacgcatccaactgtttacgggtataagtcgcagcaccttccgcacagataccaccgatatatgcagcattatcaaatacggagaatccatatcctttcatgatgtccatcaattcgacgaacttcatgccgaaacgcaaatccggtttatcgctaccataatatttcatggcatcagcccaagccattctagggaacggttcggtcagttccacaccgcgaagagtcttaaacagatgtttagccatcccttcgaaagtagtaataatatcttcttgctcaacaaagctcatttcacagtcaatctgcgtaaactccggttgacggtcggcgcgcagatcttcatcgcggaaacatttcgcaatctggaaataacggtcgaacccggataccatcaacaattgcttcaatgtctgcggagattgcggaagtgcatagaattgtcccggattcatacgtgaaggaacaacaaagtcacgcgctccttccggagtagaaccgatcagaaccggtgtttccacttcgataaaaccaaggctatcaagatatttgcggacttcgatagtcattttatgacgtaattccaaattggaacgaacggcattacgacgcaaatccaaatagcggtatttcatacggatatcatcaccgccatccgtattgtcttcaatagtgaacggaggagtcatggccgtgttcagcacattcagttcggaaacaatgatttcaatgtctccggtaggaatatttgcattcttgctgaaacgttcattcaccgttccggtgatttgaataacgaactcacgtcccaacttattggcacgctcacagagttctgcattgatttcttcgttaaatactaattgagtaattccataacggtcgcggaggtcgatgaaggtcattcctcccattttgcgactacgctgtacccatccggacagcgtcacttgcttatttgcatcagagattctcagttctccacatgtgtgtgttctgaacatatattttttttattaaacgattatccactcgcgtttttattttggctgaaccaaaactccgcaaaagtacgcaataatttgtaattcgtaattagttatccattattttatcagactttcttcgtcagctttttcaagattttcttgtttttgtctgttatattgtcaacaatagcttcattcatcaatttaattccattcatatattcttgtgctctctgaagtacattggccgcatccttctccgatgcgcgtggcactactacgcgcaatcctctttgaatcaacctgatatccacatcagcgtccgtctccataggatctccgtcaaaatgcaccactccgggagtagcccgacgaatacacagccgcctacatcggaaagtcttgatgcggctattctggtcaatcgtcttattaaacagttgaaaagcaagcgaaggcacgtccaatacggtaaacggctcgagaatggtcacatccagcaaaccatccgtcagcgtggcttgcggagcaatgtaggcattgtttccatattgcgacgcatttccacaggcaataagaaaggctttatatttggatactccattttcagtttccagttcgtatgtctccggctggtatttaaggctttcttgcagcgtcttttccaaataagtcagcaacccacgcttaccggcatgtgcaaacttcagactgacaaacgcatcgaatccgacaccacaggtacagaaaaaatccgttccgttgatcttaccataatctataatatccgtgcagccttcattgagcacttccaatgccttcttcggttccataggtatatgcaagtgacgtgcaagtccgtttcctgacccacaaggaataattcccaaagcagtatcagtatgcactaatgaacgagctatttcattgattgtcccgtctcctccgatagctaccaccatatccgttttttcttccgcagcttgggcagctatctctaccgcatgaccggctctctccgtatacactacttcccaagagtatttcgtcttgtctattttttcatccaacaaactaagaatcaattctttactttgtgttcccgaaataggattgacgacgaattttatttttttcatattatcgttcatgctattcttgtcgattgtagacgacaaaagtaatataaatatctcaaattttaatctattagaggtttcgaatcgcataggagcaacttttttctcttaaaaagaacatatgaaagcaaaaattgttatctttgccccctgttttaaacacttgttaagataaaagtatatttgatcgtcagtgaacgatctgagtatgagcataataaattataattcaatgggattattacaagagaagttagctaagtacgacttgccacaacaatttatggcaaagggcgtttacccatatttccgtgagattgaaggaaaacagggtacagaggtagaaatgggcggacacgaagtgctgatgttcggttccaatgcatacactggccttacgggagatgaaagagtgattgaagccggtatcaaagctatgcacaaatatggttccggttgcgcagggtcacgctttctgaatggtacacttgacctgcatgttcaattggagaaagagttggccgcttttgttggaaaggacgaagctctctgtttttctaccggttttacagtaaactcaggtgttattccggctttgaccgaccgtaacgattatatcatctgtgacgaccgcgaccacgcctctatcgtagatggccgtcgcctctccttctcacagcaattgaaatacaaacacaatgatatggcggatctggaaaaacaacttcaaaagtgtaatccggattcagtgaagctgattatagtggacggtgtgttctctatggaaggcgacttggcaaacctgcccgaaatcgtacgtttgaaacataaatacaatgcgaccatcatggtagacgaagcacatggcttgggagtattcggaaaacagggacgtggtgtttgtgaccatttcggtctgactcacgaagttgacctaatcatgggtactttcagtaaatcattggcttctatcggtggattcatcgctgctgactcctctattattaattggttacgccataacgcacgtacatatatattcagtgcatccaacactccggccgctaccgcgtccgctttggaggctctccacatcatccagaatgaaccggaaagactcgaagccttgtgggaagctaccaattatgctttgaaacgtttccgtgaagccggttttgagattggcgcaacagagtcacctatcatccctctttacgtacgcgatacggaaaagacattcatggtaaccaaactggctttcgacgaaggtgtatttatcaatccggttattccgcccgcatgtgctccacaagacacattggtacgtgtggctttgatggctacccatacaaaagaacagattgaccgtgctgtagagaaattagtaaaagcattcaaggctttagacctcttataatcagcactcgaaatcataaataaaaagcagaggatgaactcatcctctgcttcccaagctgttcgtatcaggatttaattccctgacagcatcttttaccaccctttgagtcggattcctataagtttctgtctgttgtacaggaacaatctcattcagcattctctcatatcccttctgttccaacaaaggcatttctttctcatctaccttcttttgatttttagtcttcatatatctccttatttttatttcttatcttaagaacagaaaatgataaaagatagttcattgttacaccaaattatatcactctataatatctctgatttctaacaagaaaaaaagtacaggtacaagagtatgatattcaatgaattgagaattaatcaataaaaaacattcgtttgcctattgttaattaaaaaatactccctatctttgcaccgcttttgaaaagaacaacccttcaaaaagtagcggggtgtagcgcagtccggttagcgcacctgctttgggagcagggggtcgtgggttcgaatcccgctaccccgactacaaaaaagagggttattaagttcaaagtttttcggggtgtagcgcagtccggttagcgcacctgctttgggagcagggggtcgtgggttcgaatcccgctaccccgacgaaagagacaaatcgaagattataaaatgaggccaatacaataaatattagcctcatttgttttacatcttcaaataatactccctagtcaacattatatattcctcgctatatttgtgacgtgctatttctgtcaacagctcttcgaccacacactcccgatgatcaaaagaaaaagcgatcaacactctttttggaacacctccgggcttagttatcacattcagttggcgggctgcatacagattccacatagaagctataccctttaccctatctgccacatctgccggaatcacaaccgtaaaagtcccatcctcagccaataatccggcaactcctttcaatagttcctcataagtcaaagaagtggcatgacgcgcggcattcctttgtacatccggacatttaagtgagcctacaaaataaggaggatttgagacaatcacatcaaatttaccggaagaatgatactgattaaaatctgcctgaaccacttctatctgttctttccaaaaagaacgagctacattttctttagcctgctccacagctgccgtatctacttccaatgctacaatttttacatctgccggactgcgttgagccaacatcagagcaaccaatcctgttcccgtacctacatccaatacccgacacgctccttgaaccgaagtccaggcacctaaaagtactccatccgtgccaactttcatagcacatttgtcatgccacactgtaaactgcttaaattgaaaataaggattcgacattttattattcgctgatcttaaaacctgttttattccactaatttattatgtaccgccaaaaataaataattattatggaagttaccctttattaccctacattttggcattgtttttgtgtttttattcaaacctgtgcttcattattaaagagaatcaattaactttgcaaacgatttatgcatatttgcatggcataaactaaattaaaacgaaaagatgaaagaaagatacttattggaagatgtcagtgacaacggtttctcgttaattaccgactatgatggtaacgatgaacatgcatttgatgtaaacataaaatctggtgaaattcttccggttctccccctccgtaatatggtattatttcccggagtattcctgcctatcacggctggccgaaagtcttcattaaagctcatacgtgatgctgagaaaaagcataaagacatagcagtagtgtgtcaaagagctgcgcatacggaagaccccaaattggaagatttgcacaacataggtactgtaggacgaattgtccgggtattggaaatgccggatcaaacgacaaccgtcatacttcaaggtatgaagcgtctaagtttgaaaagtattaccgatacacatccatatctcaaaggcgaggttgagattttggaagaagaaattcctggtaaggacgataaggagttccaagctttggttgaaacatgcaaagacctgacaatgcgttacatcaagtcgtcagatgcaatgcatcaggattctgcgtttgccattaaaaatatcaatagtccgatgttcctgatcaactttatctgctcgaatctcccgtttaaaaaagacgaaaagatagatttattaagtatcaagtctttgcgcgaacgtacttatcacttattggagcttctgaatcgcgaagtgcagttagccgaaataaaagcctccatccaaatgcgtgctcgcgaagatattgaccagcagcagcgtgaatatttcttgcaacagcagatcaaaaccattcaagacgaattaggtggcggcggtcaagagcaggaaattgaagaaatgcgcaataaagcggagaaaatgcattggaatatggaagttaaagagactttcctgaaagagctggctaaattggaacgcacccatccgcagtcaccggactacagcgtacaacttaactatctgcagacaatgcttaacctcccatggggcatttatacaaccgacaatctgaatcttaagaatgcagagaagacgttgaataaagaccattacggattggagaaggtaaaagaacgtattctggaacatctggctgtgctgaagctaaaagacgacatgaagtcaccgattatctgcttatatggccctccgggagttggtaagacatcactcggaaagtccatcgcatccgcccttaaacgaaaatacgtgcgtatgtctttaggaggagtgcatgacgaagcggaaatacgtggacatcgtaagacatatatcggtgctatgccgggacggattatcaagagccttattaaagcaggagcctctaatccggtattcatcttggatgaaatagataaagtcagtgcagaccgccaaggagatccttcatctgcattattggaagttctcgacccggaacaaaacacttcgttccatgacaacttcctagatgtggactatgatctctcaaaggtattgttcattgcaacagctaataacctgaatacaattcccggtccattgctcgaccgtatggaactgattgaagtcagcggatatatcacagaagagaaaattgaaattgcccgtaaacatctagtcccgaaagaactggaagccaccgggcttaaaaagacagatataaaacttcccaaagatacgctggaagccattatcgaatcgtacactcgtgaaagcggtgttcgtgaattagagaagaaaataggtaagattctccgtaaatcagcccgtcaatatgcaaccgacggatattttgctaaaacggaaattaaaccggctgacctatacgatttcttgggagcaccggaatatacacgagacaagtatcaaggcaatgagtatgccggtgtagttaccggactggcatggacagccgtaggaggtgaaattctatttgttgagacgagcttgagtcgtggtaaaggcggacgtcttacattgaccggtaatctgggagatgtgatgaaagaatctgccatgctggcacttgaatacatcaaggcacacgcttctatccttgacttggacgaagacatttttgaaaactggaacatccatattcatgttccggaaggggcgattccgaaagacggtccgtcggcaggtatcactatggccacttctttagcttccgctctgacacaacgaaaggtaaaagccaacctggctatgacaggagaaatcacccttcgcggcaaggttcttccggttggcggaatcaaggaaaagattcttgctgccaaacgtgccggaataaaagaaatcattatgagcgccgagaataaaaagaacatagatgaaattcaggatctgtatttgaagggattgactttccactatgtgaatgatataaaagaagtattcgccattgcattaaccaatgaaaaagtagcggatgccattgatttatctgtaaagaaacccagccaggaatgacatttgagttacaatatacagacactaaaagtaatgcccgtgccggtctgataaccactgaccacgggcagatacaaacccctatcttcatgccggtgggaacattgggcactgtcaaaggggtgcatctgacagaattgaaagaagacatccaggcacagatcattctagggaatacttatcatctctatttacgtccgggattggatgttatcgagaaagccggcggcttgcatcgcttcaacggttttgatcgccccatgctgacagacagtggtggttttcaagtattttcgctagccggaatccggaaactccgtgaagaaggagccgagttccgttcacatattgatggcagcaagcatatcttcactccggaaaaagtgatggatatagaacgtaccatcggagcggacatcatgatggctttcgatgaatgccctcccggagattcagactatgcgtatgctaaaaagtcgttagggctgacccacagatggctcgaccgctgcatacaacgttttaatgaaaccgaacctaagtatggctacaatcagtcgctattccctattgtgcaaggatgtgtttactccgatctgcgcaaacaatctgcggagtttgtggcttccaaaggagcggacggaaatgctatcggcggattggcagtaggcgaacccgtcgataagatgtatgagatgatcgaaattgtcaacgagattctgcctaaagacaagccccgttatttgatgggcgtcggtactcctgtcaatatccttgaagggatagaacgcggcgtagatatgttcgactgcgtaatgcctacacgcaacggacgaaatggaatgctgtttaccaaagacggtatcatcaatatgcgaaacaaaaaatgggaaacggatttctcccccattgaggcggacggtgcttcctatgtagacacactgtacagcaaagcgtatttgcgccatcttttccatgcacaagaactgttggccatgcaaattgcttctatacataatctggcattttatttatggctggcaggcgaagcacgaaaacatattatcgccggagatttctcaacctggaaaccgatgatggtcagaaaagtatcaactagattataaggaatgaaaagcaatcgattcataaagcggctggactggtatatcatcaagaaattcttgggaacatacgtatttgctattgcattgatcatttctattgcagtagtattcgactttaacgagaagatggataaactgatggaacatgaagcgccatggagtaaaatcattttcgaatactacatgaactttatcccctacttctccaatctgttcagtccgttgttcgtattcattgccgtcattttctttacttcaaaactagcggagaactcagagattatcgccatgttctccaccggaatgagtttcaagagaatgatgcgtccttatatgatttctgcggccattatcgcattaacgacctttatgctaagttcgtacgtaatccctaaaggaagcgtcacccgcctgaactttgaagaccggtatatcaaacccaagaaacagaatacggcacgcaacgtacagctggaagtggatagcggtgtcattgcatacattgacaattataataatgccatgaaaacaggcaaccgtttctcgttggataaattcgtcgacaagaaactggtttctcacttgacagcacgtcgtgtaacgtatgatacaaccaccgttcataaatggacaattcatgactacatgatacgcgagttggacggcttgaaagaaaaaatcaccaaaggagaccggatagactcgattatcaatatggaaccgtccgacttccttatcatgaagaatcaacaggaaatgctcaccagccctcaattgagtgactatattgagaaacaaaaacgaagaggatttgccaatatcaaagagtttgaaattgaatatcataaacgaatcgccatgtcgttcgcctctttcatcctgacaattatcggtgtttctctttcgtcacgaaagaccaaaggaggtatgggtctccacttgggtatcggactgggactgagcttctcatatatcttattccagacaattacttctacatttgccatcaacggtaatgtacctcctgtgattgcagtctggattcccaatattctttatgcaggtatcgccttcttcctgtatcaaaaggcaccgaagtagatgataagattctcttaaatagaagttccgcctattcttaccaaacagcaagtataggcggaacttttttgttgtatccatttcctcttttgtctattctacattgtcaaccaatctcctttacataagcagaaagatctgcagcagagatgtttttggctataattacaccatttccatccaataaatagttagtgaacccccggttcaaacggtatttcttaaataatccggagtcctcgccttctgtttccacgaaacaagtgggcgtaactatttggtcctgacgaacggtttccttaaaaattgactgatattcgtcaaacgaaatagaaaccatttccacattatgagaagaacgaagcgcattgcttaaacttacgttttgcatccgggattgcgcgtcataacttgcccaaaaacttagcaacacatactttcctttcaaatttcccaacttaaaggcaggttgctcttccgatgtagattcgattttaaaatctggggctacatcaccctcactcaaacctccggtaggtttgtctttctcaacgaaagcggtcaaggaacaaattagtaatacaacaaaaatccactttacatacttcatgtaactcggttttagttaatactatccgggactgtccttaaacagtggtttcttcccgaaacgttgtcttttcaggcatcaggcgaagaggaatccgctgattatcagagcctttatttttgaaaccgggtgcaaaggtaagtaattatcaaattaacttccaaaagaataagcaaaaatctcacttttcaggtataactttttatgttatttagcataaaaacgaacttttttctctacttttgcaggataaaagtctatttcttatgcaaccatcaagtacagaattgattctgattcgagttaccggtgaagatcgtccggggcttacctcatccgtgaccgaaatattagctaaatacgatgctactatcctcgatatcgggcaggcggatattcataatacactatcactaggtattcttttcaaaagtgaagaaagacattccggatttatcatgaaggaattattattcaaagcttcctctttgggagtaaccatccggttcgaaccaattacaaccgagcaatacgacaattgggtaggtatgcaaggcaagaaccgttatatcttgacggtgcttggccgtaaactgtctgcgcgtcaaatatcggcagccaccagcgtattggcagagcaaggaatgaatatcgatgcaatcaagcgcctgacgggtagaatccctttggatgaatgcgatacggatgcacgcacacgcgcttgcatagaattctcagtgagaggtactcccaaagaccgcatcgccatgcaagaaagcctgatgaagttagccagcgaactggagatggacttttcttttcagttggataatatgtatcgacgtatgcgccgtctgatctgctttgatatggattccacacttattgaaaccgaagttattgatgagctcgccatccgcgccggcgtaggcgatgaggtaaaggccattacggaaagcgccatgcgtggcgaaatagactttaccgaaagctttacccgccgcgtagccctattgaaaggactcgatgaatccgtcatgcaggagattgcagaaaacttgcctatcacagaaggagtagacagactaatgtatgtattgaaaaagtatggctacaaaatagcaattctgtcgggaggtttcacctatttcggccaacacctgcaaaagaaatatggtatagactatgtatatgcgaatgagctggaaattattgatggaaagctcaccggacgttatttgggagatgtggtagacggaaaacgcaaagccgaactactccgtttaattgcccaagtagaaaaagtagatattgcgcaaaccattgccgtaggtgacggagccaatgacctccccatgctgggaattgccggattgggaatagcattccatgccaaacccaaagtagtagcaaatgccaaacagtctatcaataccatcggacttgatggggtgctctattttcttggattcaaagattcttatttgaatatgtaattagatcgaaaaataaattatctttgcggacaaataaaataacagaatgaagttttccgaactacaattaaacgcgaatgtgcttgaggcgcttgacgccatgcgatttgacgaatgcacacctattcaggaacaagcaattccaattatacttgaaggtaaagatctgatagcagtagcgcagacaggtacgggtaaaacagcagcttttctgctccctgtattaaataaactatccgaaggaaaccatccggaagatgcgatcaactgcattatcatgtcccctacccgggaactggctcagcagatcgaccaacagatggaaggattctcctattttatgccggtatcaagcgtcgctgtatatggcggtaatgacggcattctgttcgaacaacagaaaaaaggacttacattaggagctgatgttgttattgcgactccgggacgtctgatcgcccatctgagtctcggatatgtagacctctccaaagtttcttatttcattttggacgaagcagaccgaatgctcgacatgggattctatgacgacatcatgcaaatagtgaaatacctgcctaaagaacggcagactgtcatgttctctgcaactatgcctgccaaaatacagcaattggcaaatacaatcctgaataatccgtcagaaataaaactggctgtctcaaaaccggccgaaaagattatccaggctgcttacgtttgctacgaaaaccaaaaattgggaattatacgtagccttttcgccgacgaggttcccgaacgtgtcatcatcttcgcatcttcaaaaatcaaagttaaagaagtcgctaaggctttgatggcgatgaaattgaatgtaggagaaatgcactcggatcttgagcaggcccaacgggaaacagtaatgcacgaatttaaagccgggcgagttaatatactggtagcgacagatattgtggcacgcggcattgacattgatgatattcgtctggttatcaacttcgacgtccctcacgacagtgaagattatgtgcaccgcatcgggcgtacggcacgtgccaataacgatggagtagcgcttacatttgtcagcgaaaaagagcagagtaatttcaagagcattgagaatttcctggaaaaagatatttataaaattcccatcccggcagaattaggggaagctccggaatacaagccacgctctttcagcaaaagcaggtacggcagcaaccctaaaagaagaaattttcgggggaaaaacggcaataacaacaaaagtaagaaccgcccctctcccagacaacaaaattagaacagcattttttatttagtggaagtgatagtcagtttaccatcgaaacccacttctatctccgcaatgctatatacagaactttccggaatggctaaaactgcttgataatgaaaaccattccggtctacttttacaaacttcgtatcagatagaatagcctgcgacaggaaatcagcaggaataacctgagcaaacatctgcttggtcacatcactggcaaacaaacttttcttgccttcgtacacacaaatgtgcatcacattgtcgtaatacacattgtccatgctaatcccgtcttcggaataagtcgtcttgacaactctaattttggtaggattaatatatacataagcgcgatagcgagtgccattgtatgtcaccacactatcccgttttgtcacttccgtataagtcggtataaccacttcacgacgaacaaatgacaacgaatcattcggatcctcagatttatgcagtttgattatgttgtccgtaatggaatgaaaccagaatatatgttccgcctgcttatctatcttgtagtaagccgtatcatttccatacgtgtaaagcgtatcacgcataaccttaaatgtaatcggagcactttggctatctgcataatagatcgtatccccctctacccgcatcaacggactctccgtttcatcgtccagccaaattccctgcaacagttccttagcagctatatcctcttcctccagttcaagaaaatttggatttttattgccgccacatgacgcagaaaaaatcaccatcaacgatagcactacatatttcatcatttgttccagttttgcataaagatactcttattttttcatttaccaatgcaatagtaaacgaatccgaattcttccatctctttcttatcgtaaatgttacgtccgtccaatacaacctgctgtgccatcgttttctttatgacagcccatgagggcagacggaattccttccattcggtaaccaacatcagcgcatccgcatcaagcaccgcatcatacatatcgcaagcataatagattgtatctccgatcctacgcttgcactcctgcatggcagcagaatcgtacgcacgtacctgacagccagccttcaacagcttatcaatcaggatcaaagccggagcttcacgcatatcatcagtctccggtttgaaagccagtccccacaaagcaaccgtttttcctttcaggtcaccattaaaatgcttcaccaacttttcaaacagaacacttttctgttgctcgtttacctcttccacagcactgagcacccgcattttatatccattctgttctgccgttttgataagggctttcacatctttcgggaaacaagaaccgccatagccgattcccggatacaagaatttacgtccgatgcgcgtatccgaaccgattccgctacgtaccatattcacgtcggcacccacaatctcgcacaagtttgctatgtcattcataaaactgatgcgggttgccaacattgaatttgccgcatatttagtcatctccgctgacgggatatccataaagataacgcggaagttatttagcaagaacggtttatacagcttcgacatcagtttctgcgcacgttccgactccactcccactactacacggtccggactcataaagtcgctgatcgcatttccttcctttagaaattccggatttgaagccacatcaaaatggatattcacccctctcttatccaactcctcttgaataaccgcacgaaccttgccggcagtacccaccggaaccgtactcttggtaacaaccaatttatattgtttcatattgcgaccgatagtccgggctacctccaacacatatttcagatcagcgctgccgtcctcatccggaggcgtaccgacagcactgaatactacttccacatcatcgaggcaactctccagtgaggtagtaaacttcaatcgtttcgctttcatattgcgaagtaccatctcttccaatccattttcataaataggaatgataccctttttcaaagattcgattttctcactgttagtgtctacgcaagtcacatccacgccaatttcagcaaagcatgtacctgtcaccagacctacatatccggttcctacaattgctattttcatatctttatttattgtctattcagaagttattcaaaatacaccgcatctttgaaagccgttcccttcttgtctttaggagatagcaacatctgcgactcggcaagcggccagtctatacccaatgtagcatcattatatataatggaagcctcactttgcggagcatacttattatctaccttgtatgtgaaaatggcttcgtcgctcaatacggcaaatccatgcgcaaaaccacgtggaatgaaaaactgtctcttattctcttcgctcaacaacacacacacatgctttccgaacgtaggcgatgatttgcgcaaatccacagcaacatccaacacttctcctttgataacacgaaccagtttagcctggctatgttcacctttctgataatgcaatccgcgtaataccccaaaggaagatttggattcattatcctgtacaaaatcaacaggaccgatattagcctcaaactcctctttcttaaaagcttccataaagtagccacgttcgtcggagaaaactttaggctctatcagccatactccgtctatttctgtctgtatatagttcattgtcgatggttataaataaaacgatgcaaaagtagtgattttttcgtagttttctgggatatattcaatttatctcttaattttgcacacatgattgaattagcacaacatatagaggttttattgctggaaaacgactgcgtcatcgttccgggatttggtggattcgttgcacattacgcacctgcaactcatgtaaaagaagaaagtcttttcttacctcctacccgtacgataggattcaatccgcaactgaaactgaatgacggagtgctggtgcaatcatatatggccgtttacgacactagttttgctgacgccagccgcatagtagaaaaagaggtgaacgaattcatctcccttcttcatgaagaaggcaaagcccatctggagaatatcggtgaaatccattataatatttatggcaattacgagttcattccgtacgattataagctaaccactccttctttatacggattggattcttttgagatgcacgagcttgccgccttgccacaaaaggaaagagtgttaataccactcaatccggagaaagaaaagaaaacttatgaaatcagtatcaaccgtacattcctccgcaatgcagcagctatgattgccgccattgtgttgttcttcgctttttccactccggtagagaatacctacgttcagaagaacaattacgcacagttgttacctaacgagctttttgaacaaatagaagaacagtcggttgcaatgactcctgttccggtaaagaacgatgtgaaaccacagagagccaagaaagctaaaacatcaaagcccattgctgtgaaagaagttaaagtggcgaaaacgcaaacagttcctgcgccatcggtaaagccacaagctaatacgaatcacccttaccatattatagtagcgggaggtatcagccttaaagatgcggaagctatggcaaaccggttaaatgccaaaggatttgcggaagcaaaagcgctgaataccgatggtaaagtacgtgtcagtatccgctcattcagcaaccgtgaagaagcgacgaaacagttgttggagcttagaaaaaacgaaacttacaagaatgcctggttactggcaaaataaaaatcccttttaaaaagcatgaaacgagttctttgtcccaaatgtgagaattacctttattttgatgaaaccaagtatagtgaaggtcagtcacttgtatttgtatgcgagcattgcggcaagcaattcagtatccggcttggaaaaagtaaagtcaaagctctccggaaagaagagaatctggaagaagaggcagaatcccataaagaagaattcggatatatcacagtaattgagaatatattcggattcaaacaagtacttccactacaagagggtgacaacgtgataggacggcgttgtgtaggaacagtcatcaatactcccatcgaaagcggagacatgagcatggaccgccgccactgcattatcaatatcaagcgcaataagcaaggaaaactaatctatacacttcgagatgcccccagtcttacaggcacattccttatgaatgaaatcttgggagataaagaccgtatccgtatcgaagatggtgctatcgtgactattggagctactacctttatcttgcacactgccgaataaatttatattcattttggtacatatttttgcatcgtccggtaaaaacaattgccgtgccgctttgataaataaagggtcagtagatttttagtggggatatacataaattttggcgattctattatagctcttgcttttcatcagccacttttagttcaataccatccatgagttttcattttatatgtttatggtcataagataatcagatataaggatacaggtgacagatgtttttccaaaataataccgggtagagcggagttgacggcaataaaaaagtgaaaggcgtcaaacccatattgttgtagacaagaatggcttccttattgcagtgatggttacagtagccaatattcatgacagcaaggctgcttaaatatttacacaaataaacaggcaaaaagcaaagggtatcccaatagccataagactatcaagacaccctcttgaatgaaaaaccaaactcagttaaattcaactattcggcctatctccgatatctaaatcaaagaatacccttcacagtttcaagcattcccttttcttgaatagaatccaaatcagcttttacagcttccgtcaatcccggaattttattcaaatcttcaccccagataaattctgcgcccagaacaccttcggctactttctttgtgcaaccagtagcccacagttctttcagcagattcatgatttcaggagcgtcgttcggcacaatctcagcgccatccgcacgtacgccacccttataataagtaatgatagctgccaaaccaagtacaagtcctttcggaagctcacctttacgttccagataagttttcaatcccggcagatcacgagtctcatatttcgggaaagaattcagcataatgcttgttaccgcatggtctacaaacggattattgaaacgctccaatacatcatttgcaaatttctccaattcatctttcggcaggttcaaagtttccatcaactcgtcaaacatcaccttatggacatattttccaattacttcatgctggcaagcgtcacgaacaatattcacaccggacaaataagcaaccggagaaagaacggtatgcggcccattcagcaaagtaaccttacgttcatggtatggagcttccgacggtacaaacaatacgttcaagcctgccttgtcagccgggaattctttggcaatctcctgcggagcctcaataacccacaaatggaagatttcagcctggaccaccaagttatcgtcatattgcagtttttctttgatagctgcaatatccttgcgggggaatcccggaactatacggtctaccaacgtagcatatacaccacaggcttcttcaaaccaagtcttaaattcttcgcccaaattccacaactcaatgtattgatagatcgtttctttcagtttgtgaccattcaagaaaataagttcgcaagggaagataatcaggccttttgtcttgtcgccattgaatgtcttaaaacgatgatataacaactgagtcagtttacccggataagaagaagcgggagcatcctctagtttgcaagtcggatcaaaggcaataccggcttctgtagtatttgaaataacgaaacgcatttccggttgttccgccagtttcatgaattcgtcattttgagtataagggttcaatgcacggctgattacatcaatcattgtcaagctgttaaccacttctcctttatccaatccttgaagattgacatgataaagatcgtcctgcgtattcagcatatcgaccatacctttgtcaatgggctgaactactacaacactactgtcgaaatctgttttctggttcatgttatagataatccaatctacaaaagcacgtaaaaagttaccttcaccaaattgaataatacgctccggacggtgtgccttaggagcagtttctttgtttaatactttcatgttagttgtaatttataaagttgatattatactaattcaaaataaaaatcgatgttttctttaatcaggatatcaataggcatatatttcacaggatcgatatttttcttgaacacgacatgatcacacaaagctttcacaccgcaataaccttgcaatcccggccgctgtccgatcaaataatgtacattccccgatttcagcaactctacatttgctttcaggaggtcatatcctatcaatcctttcatgctacgccctgcatgacggagatattctcccaactgatatactctggaattgaacacaactccgagtacagctttcgggtatgtctcaaagaaccggtccagtgtccgacagttattttcctgattggacttattcaatactacttcatgaatcaccagactatcgtattcctcagtgatatactgcataaaaccttccagacggcgctgcatctgtatttcagcagggttatccttgttattacttaaaaacagtaccagttcctgtccttctcccaccgaataattacgcatcaatatcttagccgcaatgtatccgctcttatacgaatcttgtccgatataggttaatgcattcatttcttccatattgaaatcgacgaaagcatacgctatcccattctctcgcagatagcccgtcaatgataaggtttcttcccggaaattgggagcaatcaacaccgcatccacattgctttccttgatagaacgacaggcttcctgatagctggcttcatctccgtgatggtaacacagataatccacgctcacattgaaaggacgcaactcttgccgggcacgctcaatgccacccactacggaatgccaataatcgtgctctatataataaggaattaagcaaacgaaagaatatttctttttagcagccagtccgatagcaaaaacattgggctgataatgaatttcatccagcaccttctgaaccttagctttgctcttaggagatacgtcaccgcgattgtgcaataccctgtccaccgttccggcagaaacgcctgccatacgggctatgtctttaatcgtataattctggtcctccatagtgctaaaacttaaatattataaataatcgctgcaaatatacgaattattttgttactccaagtaaaatttctatttttgtgttcgataacggttaataaaactaaaacaagatttacacctagtagctttaaaatcaatactatataggtataaatacagaaagtaataattttatatacttaaaacacagtaataatgaagaatttcatggacgagaacttcttactgcaaacagaaactgcacagaagttgtatcacgagcatgcggctaaaatgccgattatcgactatcactgtcatttaattccacaaatggtagccgatgactacaagtttaaatcactgactgaaatctggttgggaggcgaccattacaaatggcgcgctatgcgtacaaacggtgtagacgaacgtttctgcacaggaaaggacaccacagactgggaaaaatttgagaaatgggcagaaaccgtaccctatactttccgcaatccgttataccattggactcatctggaactgaaaacagctttcggcatcgataagatattaaatccgaaaaccgcacgtgagatatacgatgaatgtaacgagaaattagctcaaccagaatattccgctcgcggaatgatgcgtcgctaccacgtagaaaccgtatgtactaccgacgatccgatagactcgttggaatatcacatcaagacatgcgaaagcggatttgaaatcaaaatgttgccgacttggcgtccggacaaagctatggcagtagaagttccggcagatttccgcgcttatgtagaaaaattggcagaagtaagcgacaccaacatttccagctttgacgatatgattgccgctttgcgcaaacgtcacgatttcttcgcagcacaaggatgtcgcctgtccgatcacggcatcgaagaattctacgcagaagattatagtgatgcggaaatcaaagctatatttaataaggtatatggcggtactgaactgacgaaggaagaaattctgaagttcaaatcggcgatgctcgtaatcttcggagaaatggattgggaaaagggatggactcaacagttccattacggcgcaatccgcaacaacaacaccaagatgtttaaattgttaggtcccgacacaggtttcgactctatcggtgaatttacaacagcaaaagcaatggctaaattcctcgaccgcttgaacacaaacggtaaattgacgaagacaatcctctacaacctgaatccatgtgcaaacgaggtgattgcaactatgctgggtaacttccaggatggatctgttgcaggaaaaatccagtttggttctggatggtggttcttggatcagaaagatggtatggaaaaacaaatgaatgccttgtcggtactcggtcttttgagccgcttcgtaggtatgttgactgactcccgttcattcctatcctacccgcgtcacgaatatttccgccgtacattgtgtaatctggtaggacgtgacgtagagaacggagaaatcccagcatccgaaatggaacgtgtaaatcaaatgattgaagacatcagctataacaacgctaagaacttcttcaagttctaagtagtatatcaaagttataaatgccgctgcctgaatccaacaatcagacaacggcatttttataacatctattcaattaatctgctgtaaaccaacaaaataaggaggcaaaaacctcctttttccttgtacaccctcagggagtagaactgatatttaaactaataatattaaatacttaacaatactcaatatcagtacattatattatatatccatatattacatattcacgaaatcttaataaatagcatcaaaaagaggggtaaaaacaacttttacccctcttttttgttgctccattgtttaatttaaaatttaatagaaacatgaacatcagaaagaatctacgggttttcatcaaatcccgtaacaagcagattatttgtcgtgtgaagtgggtaaaaggagaaatagacttttacattggttactacggcgacgagactaaatgggataaagcaaaccaattaccgctaaggaatacgacccatacggtagggaagcataaagcgattgcatcagaaataagccgtgccattggaggctacaaaaatgcgatagaggatgttttcaaatattatgagggtgtccagcatataccgacaaaggaggaagtcaaactaatgattaatgaaaggcttggaaaagtcaaggtatcagtagaaaacaaaaacttctttacggtatgggacgaatacatagaagttcaaaagaagcaaaagaactgggtgccgaatgtgacaaagaaattcatctccttaaaaaacatcttgcgaagtttttctcctgacctctcatttcagaaccttacagaaaacaaactgctggctctccgagattggtttgttgaatatcgtacggaagataaaaacggaaaattacaacataaataccgcaatacgactattaataagtactttgaatttttaggttggtttctgcggtgggctgccgagaatggaatgctaattcatcgggaagtcctgaaattcaatacttgtctcaaagagattccgactcccgtttcctttttgaatatagaagaattaatgcagttttataattaccaatatcctaaaaaagacggaatattggaactatcaagagatatgttctgttttatggcatttacatccattcgatacagcgatttaaaatccctttgctggagtgacatacatggaaagattatggaaatcgttacggaaaagactgatgaacgactgcaaatcgaattgaatgattacgctttggaaatcttgaagaaatataaaaagatgaagcagaaaggaaatcatgtgttcccaccgctgtcaaatcagaaattgaacagtcatttgaaagaagctgcattattagctcaactaacaaaaacgtgggttgatgaatactacataggaaatgaccgcataagggaagaatacaaattttatcaaataatctcctctcatgacgggcgccgaacctttatatgttgttcgcttgcgtttggaatccctcatacagtcgtaatgaaatggacggggcatcgtgattatgcctcaatgaaaccatacattgagatttcggacaagacgaaggctgcatatatgggaaaatggaatttctaatagattgatagtctgttatcttatataaatattaggcaggaatataatctgatgaagtgaatattcctgcctattctttgtttttcaataatatctattttatctttacacccgaaaatagataaggtattatgaccgtgtaaaatcagggcttttttatagagccatgttcgcatcataggtctatcaagacagattttacagaaggactgcaccatactcttctacagttgtaaatatggtgcgagatgaacgtaaatttattaaatgtttaatcatggacattaacaagcccgtgggggcgcttacggttcaagaacttcttgatatcttacaaccaattatttccaatcagaatcccattcagcctgaaagaacggagaatgtaaaacatcttgtttacggattgaaaggacttgcagagctacttcattgctccatagcaaccgccaaccgaataaagcaggaaggttgccttgacaaggctatatcgcaggtcggacggaaaatagttattgatgctgacctcgctttggaacttatgaaaagtagtcggaaagcatatctccgagccaaggggtaagatagtcaaaatggaaagatgaagccgtttctcgttttttgggaagcggctttatacttttatcccccacgtaaaaaagtgcctataagcgcctgaaatgcggtttgttgacatttttttctatctaagaaacatctctcctcaatacatgtgtgctgtatatgcaaaaaacaaaggcttttttcttggctgattagttttaataaagtaattttgcattacatttcgtttacgaggtgcagacatattataataaaagagcgtttaagatattatcttgtactggaatctcgacaattcttttacccaagataataagcaagaacgctcacgctgatgttatatatctgctctgcttggagcagtctatatatcgtttggcgtgggctattgtttattattgggtaagggcagtcgagagcctcagtacagtaatattcaatgttcccacgcctctttatttttaacagcttacaagggagcaggtaagcatcaatctgaaacaaaatgaaaatattaagattaatcggtatgcttcttgtttctgtaacagtgagcataaactctctaacgtgcaacgcccaaaactacaaaggttctattgaaggcggtagaactttccatactgacgatataggaatgttcagcactactgatatttatacaacgcatggggttcagcttggctctcgtttttatatcggtgtaggtgtaggtgtacgtttaggcgatgattatacttccataccgctatatggtagcgtgagatacaccttcctcaaaaagaaaatctctccgtttattgatgcgaaagtaggctatagtctgcttgacgcagcaggattctatgcaaatccgggagctggtgtgaattggaatttttataaggcgttatctgtgtttctgaaagttgggtatacttataattccaaagcatacggagaggcttggaacaaagacggtgatgatgtttatccgcatggcgtctctgcttctatagggtttagtttctaatcaaaaaagcgtgcggctttatgtcgtgttcctcatgccttattattttataacgctctgagaaggaacataggagcagaaataacaatctattagttaaaatgaaaacattaagatttatcggaatggctattgtagccgtaattatgtgcgtgaacttcgcagcttgtagcgatgatgatgaagaagaagcaaacgctacaatcgagggtacttggaaatatacttcaagctctgatgaagatttgcgttcaggttctttcactttcaaaagtaatggtagtttagtttgggatgacggagaagaaacttcatctaattgttcttataccttaaatggtagcaacctgaaaatcatactgaatcaggatgattatattgaaggtacgatagctatttctaaaaatcaggctacttataaatatacttggcatgattacgcaggggaatgggatgacgatactgaatatatcatgactttagtaaagcaatagaaaataaaagaagccgtgagaaagtcgtaatggaatgctctgttacgactttttattttagagtaagattttaaattcattctacgaattatcctgaatgaataaggggtaaaatattaccccctcattaacagacagcccaccttgaaatgcgattttcttatacctataagcataagaagcctatcctttaatatccccccgcactattcgcttttaaaattttaatcctcacccttcctaaaattaatcttggcaagacgattcaaattaacaggcttttaacaaaaattccattatggtttctgcatatatcattcattttccttcaataccacaacactatttatcaggctatcttctgtgaaataacacaagatagaaaaagactaacgatagctgaaaagccccgatacttcaagcattggttattaacctgattttaagagaatgaagcgatgaattaattctcccaatccgttccaatatactcccaagtccactttataaccctgtctatattcagataggaacaatatacggacgagataccgtttagcatactttctatccgtaaaccaatcaataaccattaatatttatcaacatggaagcagtaaccattttgccgaatacggcacagcaagaaccgagaaagaccttagggctaaacagctacgcagacgatgcagaaattctcttagacgagccgaaaaccgtcaagaagacaaatcactttatcgaagcgaacacctcggaaatcgacctgaaatctcttaaatcggaatgtatcattcccgtctttgcgaaggacaacgaactcacaatttcacaccctgcattcattgaaaccgcctatgatgcagccacttccttcttcaatggagaacgcatagagacgccagctattcgggtttctcatgtggtgaaaggaagaatacccgaagcgatacacaagcccgcaaatcaactcttagaaagcgacaagaccatttattatgaacggtgtgcattcgccattgatgttcctacaatattcgagacagtaggtggcaacaaactgaatctctccattgtaggggtgcgtgcgtacaatcgtgaaaacctgtacagtagaaagacattggaacggttcagcgtagctatcggctttgtgaatcaagtgtgctgcaatatgtgcgtgttcactgacggctaccgttctcaaatagaggtcagcagtacaaaagacttgtaccgtgctttattggaattgtttaaccagtacaaccctgcaaagcatctgcatctgatgcagtctcttggtaatacagtgatgaccgaacaccagtttgctaccttgttgggaagaatgcggctgtatcagtgcttgccacaaggctatcaaaaacgactaccaagaatgctgctgaccgatacgcagataaactccgtagcaagaacatacattagtgacgagaatttcggtagcttcggtagcgaactggatatgtggcggttctacaaccttctgactggagctaacaagtcaagctatatcgacagcttcttagacagaagtctgaacgctactgaaatggcggtaggaataagcagcgcattgcatggtgatgaacgatataagtggttcattgattgatgaactcgattgggaggaaagaaggggcatgctttatgcgatgtcctttcttttaatcctgatactgatataaagttctgttatgcaatcaggctgttacttgaacaaattatacaggattgaagatgtatgtaaataaagaaaagaaaggatgatatgacatgaaaattcacatcatatcacccttccaaactgatagagaactaagtaattgaagtcctctgaaataaaggaaactttcgcttactatagaagttctttaaaaaccgtacattttcctcatcagttcaaatgctgcatccagttcttcaatatgaccgcttttctgaatgaaggattggtcgacactgttagcctcactaatcacagaccgtagatagtcaacctgtctagaactaatccgtccagtcttctgttgttcgcttatcatcttctccaagggaacacatccttgcaccttcaagatgtatgcaacccaaaaaacacgggcgtcctttttgccttttacaactcgcaggtctaactgcacatcattgaccttctctattttcttgtaccgtccatagagcatctttacaagattggtaaagaaagtctcattcagcaacatatcaactaaaacggtttcagttccaaagcgtcgtttccagtcctgcttcccataggaaaaccttaattcgatacgcagtatatttccattgaaaccacaatcgaaaaattctcttttacgcttcatctctttaagcttgtcatatacatgcaagagagttttagactgtctgtaataaagagaatcaggttcttccagcctatcatgcctactcaaactcccaagtcgattaagatactccttagggttttgagatacgatagcattgtaggcaacgtcaatccgcatcacacgagccaaccttaaaggtaaacacaacttttgcgaaagaaaatcaatcgcttgacgtgtttcctccatgctaagaccttgaacgttgtttcctttcaaatacttgcatagactacccatgataacaatcttttcaggatagacagtgatgcggaggttttcaactgttccacaaattttcatatcatcagaaccataaggaagcgttttcagacttcctgtgtctaaatgttgcggaacacttctttgaaaagaaacatcgctttgctgctgatacagcaccataattacggtatcatacgacaccatgttcagaacagatttattcaatccgttttcaataattttttccataaaatggaggtttgaaattaatcgaaaatctccttcacagaatccgtgaaagtttactgaacatctgccatacacgcatacgctttacgtagcatggctacttctgaagaatctaagaaagagaaaataaaccctcactaataaggcgtgaatcctctctcattgaagcttgcaagcgttttcaaggtatccaaaccatatccatagcggtaagggtttggtttactcttaaacaagaaaccctctcatcaacccctattagaggggtaaatagaggggtaattcttataacttactggttttcaataccatttgtacaccctcagggattcctgcaagtacctatcaaccaatcaattatcgcagcattttccaaaatgttccgcaaatgttccgcatatctgattaataatatattattttacacctctgtcgaggttattttcattcaactgtttaccgaatagtcccggtaggcctttttctccttgtgataataagtttcgagagttgtatctacaaatgcgatactcattattccatgttccgcaaatgcgatacatgctattttttaactgtgtaaaagcggtttccttagtcgtcataattgtttttactgctatatttgtatcgaatcagtttattaactcctaaaacttgtcattatgctcggtcttgttatacttttgctcatgtatcttgctattatattcaccgcaacaataattataggttggattagggatgacctataaaagttttcaataagtcgattattaatcattaaaacttatcattatgtcagatgaagaattgcgcgttaaatgcctagagctgtccgtagaatgctttagctggtttaaaggatgcgcacacggtattaaaggcacccctatcacattagctaatctcatgtaccaatttataaaaactggagaaacacatagcgctaaagcctattatccacaaccgctatagtcccgcttaggtgcatcgcatccggggaaaactacgggtattgaaaatctgatcgtactaacagtgctattattagcctcgttgctaattagattattaatcattaaaacttatcatttatgagtagatttaagttttttctactgctttttattctatcgattatagcattttccttgttgaacataatggtgatgcttaagaatattactgattatttgggaattctcttttgagtctgttttcaataatagcagcagctttatcatagtctgctacgccccaataattagttttacatataggacaatcatcactatactgattcagtctagcaccgtctttagggcagcatgggtgtaagtttgatatagtccatccattatcagttttcaaccaactccattcccagggtattttatcgactacttctctcttgtatgacaagaatttcggtaattgtaattcttcttttttaatgcctgcttctgctttggttatttcgatattattgatgatatagtgaaagattagtattacggctataaaaataagaatccaccataactcaattttaatagtcattaatcctataaatttatcccataaccagcatatcccattccatatagccccagatataggatattctttagtcttttctactattaaccctcctataacagtagttgctaatcctgttgcccaaggccatgtagtcttcattgttttaatccacttactcatgagcatagttaataaaagtttattcaattaccaccctctttcatttagtatcttaactaccttccaaacactcttaatcatgcttttgggcaactcttcttctggatacctatcgttgtgcgatttacacaatacgtagttcttggaatcctccggatacttttgaacttctttcaatatacgtctaccatcggtaagaagaaggacaaatatgtttccatacccaaagtattctctccattgtggaatctgacgtataagtactctgcttccaggtgggcacgtcggcgacatgctttcaccggataccgttagagctacgtctccctcttgagcatctgtaaatgggattagctggtctgcgtattcacggtctcctgacacaacatttgggctatggatacctcctactgtatcaaggttaagaagcggaactagtttataagaaaccgcattgtccttattcgtaacaggagtggctgaaacaccattagaactgtcaatctgagtcatatctgctaagcttggatcatcattggaaaaagaatacatatcccctttgccaaataataaccaactaggattaatctctcccaagatatctttgcagtcactaggcgcagcattcacctgcagaattttaattatagtatcataggtcggtttatttagccttccacctactatatctctcatagtgtatagattgatgccagcagcgtccgacaacgcttttacactaccaccatacaatttatccactaactctttaattctttcatttatagtattttgagccatattattatttatacacactctaaataaatgtatttacattaactatgtcgctaaaaacaagacaatgtaatgtaaatacattatctttgtattcgtaattcaattcataacacgaaagaatacaaaaagggctgttagagaagcgtccctaattctatcttcgtttatttagtcatttgcaaagatagacagtccttttcaattttccaatgatatatgaatgttttacgacagcaatggcggtttagtggcatttaccgtataataaggaaattttggaaaagctcttccgagtaaatactcaaatgccacaatagagtatcgaaaggaggagctttcttattaggaggaagaaaaaggtatgaaaaatttaattccaatccaagaaaacaacggaaaaaaagccgttaacgcacgtgatttacacgcttttttagaaagcaaacaagaatttgctaattggatcaaaaatcgtattaataaatacgactttgtagaaggacaagattatcaaactctttattttgactttcaaggtaacttattgaatatcagacacgataattttatcaagtctgaaaatcagcaagttagcaaaatcgaatatgccttgtctatcaacatggcaaaagaactatcaatgattgaaaacaacgagcgaggtaaacaagctcgtagatactttatccagtgcgaggaaatagctacaaagaaaaagatcgagagtaaagatccgatggcaatgaatgccaataccttgtataatcttcggatgaaagctgtagcgtggactgcaaagatgctcaatctgtcagaagaatccaaactaagaatgattcaggcagtcactgatccgttaggtttaccctctccggattatgtaaagtctaaaggagcaatgcactctgctacttatctactgaaagaaagaaacaatccggttagcgttcttctgttcaatcagaaaatgattgccgccggttatctggaagagaaagagcgcccctccaagagcaaaggagtttctcgttacaagtgcttaacagaaaagggccttatatatggtgaaaatgagatatgtcccaaaaatatcctagagacacaaccgcactattacgatgataggttcgacgaacttttagagaagttattagtaaaatgaaaaggagaactaatcatgctttcaagaacagaaatcaaccttattgctaaaagagttgccgaactcatccatttaaagagtgacgaactgcttacagcaaaacaatgcgccgaatggctcgggatatccatgaaagccttatacgcaagagtctgccggggacaaatcccctatcataaaaggcatgatgtcctgcatttctcaaaaaacgaggtaaccgcatactatttgaatgataataaaccgcgtcgtgagaccgctgattacaaaagtgataaatgattgaatcgggtgagaacggggtgatatccttctcacccactaaaagcaaaaaagttatgaaagatatgaataccatcagcaaatgcctgcttactgttattgcgacaacagttacaatagcaggatgcatttatgccggaaaagttgagtatgaagatgaagtgctgtccggtatgagcgcagaaaagtaccagtacatacacgacagtctaggacatcgtgcctctcaagaagatgtgatcaaagaatacatcaccaatcaaaagtattatgattcaaaattctattaaaacgataaacaattatggacgacaaaaaaacaggaagaacttaacagccttatcggtaagaaggagctcgctaaagtcggcaattggtatcctgatctttactctcagatgtcatactcaatagctgaccttcaaaaagagaagcaagcagtatttgacgaaataaaagggctctatgaatcgcaaggtgaccttatggtaatcgagatattaaaaagcatttatctctccttcattgaccgattcatggatggcaacgggaatttaggggatgccgacgaagaggtatcttttacccgcagaaagttattcgattttgcaggagatatctatgctaaaatagaagctgcatcctatctgaaatctgcactaggccatttccatcgtattagagacctagaatctcgtattgaattagctaaaaaaggaatattactctaaaaaaagaatattatggattttaatgtaaacgtaaatgtaaaattagacgccacccccgcattggtgggtgcagtatcagcactggcaggtgtggtaaagactgctgaagtattacaaccccgcacgattgtgacagatggaccggtacattttgtgccatcaactgccgcatcagagcaaaagacagagcaaatagctccgtccgtaccggaaacttcagcacagcagcctgcacctcaagtagaagaaaaaaaacaaggtgaaattacagatgaaatgctccgaaagattgtcggccccgtgtccaaagctaaaggtaaagaagccgtgtttgctgtacttggtgaatttggtgtgaaacgggttccggacttaaaacaggaacagcgccaggctttcatcgataaagtaaacgccctatgagccacgctgttttatctccttcttccgccagccggtggctgtcatgtacgccatcggcacggttggagatgcagttcccggacaaagcgggtgactttgcactggagggttcacttgcacatgagttcggtgaactccgtctgaaacgctactcaaacataatcgatgaaccggagtggaacaaaaagacatcagaactcatggagaatcgtttttatagcgaaagccttgaagagtatgcagaaaattatgccgcattcgtttgggagaagtaccaacttgcacaaaaaacgactgctgatgcggttcttcgtattgaggagaaaatagacctgaccgcctatgttcccgaaggatttggaacaggagatgccgttattcttgcggatggcacaatggaaatcattgacctcaaatacggtaagggagtacaagtgtctgcggtagaaaacaaacagatgatgctatatgccttaggagcattagacatgttcggattcatgtatgccattcatacagtacgcatgactatctatcagccacgattggataatatctctgaatgggagataccggcagaagaactgctgatatggggcgcaaacgaattggcgccgcgggcaaaaatggcgtttgccggagaaggcagcttcgttcccggaaagcattgccagttctgccgggcaaaagcccaatgccgggcacttgctgaaaagaatctggaaacggctaagcatgaatttgacgatgcctctctcctatccgacaccgaaatatccaaagtcctggaacaaatggatattataaagaactggatgtccgctattgaagaatatgcgcttcaagcagcactcaacggcaaaacgtttccggggttcaagttggtggaaggccgtagtatccgaaagtacgtggacgagaaacaggttgcagatcggctaatggaaaacggatataaagaatctgctatttacgaaccgcccaaattaaaaacgattaccgctatggaaaaactggtaacgaaaaaagcctttacggctttactgggcgatttgatcattaagccacagggaaaacctacgcttgtaccggagtcagacaaacgccgagaatggaattcagtagagaacgactttaaaaatgtgtagaagtgaaacttatcgatgtattatccgccctgaagttgaatcatatgaccgatgttcagggtacaaaaatcgtagcccgtagacctagagcctatagtagtacaaatgatccgggatgcaaggactgtatattccagaaagaaggcggtgcagccgactgctcttttaaaaacagctgtatggcacataaacgcctagacagaaaatcagtaattttcaaaatatttaaaaacaaaaaaataaacggttatgaacgataatttgaataccaaagttattacgggaaaagtaagaatgagttatgtacacgtatgggagcctgttgccatttcagagggcggagagaaaaaatactcagtttctcttattatacctaagagtgatagtaaaactgtggaatccgtcaaagcggctatccaaaacgcactgaaagccggtatcggtaaatttggaggtaaaattccctctgtgtataagaacccgcttcgcgatggagacacagaacgtccggacgatgacgcctatagcaacagttatttcctaaatgccaaatgcaaaacaaagcccggcgtagtaaacgccatgcataagcctatcgaaaacgaggatgagttctacagcggctgttatggctatgcttctatcaccttttacgcttttaatacaaacggtaacaagggaattgcctgcggtcttaacaacctgatgaagattgcagacggagaaccgcttggaggccgttctacagccgaaagcgatttcgcagacatagaagtcccatttgaagcaccaacagatgacgacgatggtttattctaacctcattccacgagaacagattgtcacagtggcgtccggagtgatccggcgctacagacaagatgcctccgatcaagattgcgaagatttactgggggcatttcttattttgtcgaagtatctagaaaacttcttcaccggtgatttttatacgaagatcgaatgtactgaaaaggagttccaacagttgaatgccatcgccacttcttataaaaatacgtttgaaacatggagcgagctaataggcttatcgcctacggtaattcggtataacgttaggctaacaaatggtttttctatcatttgtaatgagattgcagtgagactgaacggcaaggccgcggagtatgatagggaacctattaaagtgttgggcatcgacatcgaaacgttcagttctgttgatattaccaaatgcggattatacaaatatgtagaatcggacgactttactattctgttgttcgcctatgcctgtgacgataaacctgtacagattgtcgattttgcatccggggaaaaacttccggaacgtatttttctggcattgaccgacccgaatgttttaaaaacggcattcaacgcatcttttgaacgtatctgtatcggaaggtattatggtattgaccttccaatagaacagtgggaatgcacaatggcacgctctgcgatgcttggactcccgctttcattggcacaagtaggaaaggttttgaatctcgaagaccagaagatgacctataggcttgtattcaagttatatgcttctgtatccgccaacggtgtttcctctatggcggaagttaccataattgacatatccgtttccttttcaaagagcggatacatatcacgtttctttgcgaacggaatgtctttaggtacatcaacagataacatatttgccgttttcaacaagcgcaatgcgctcttgggaaattatatacaagcagaaatgcataacaaggatgttggatttagaattttagcacagaaactattagcaaagcagaaccctcacggcttttccaatgagattccgtgggggatggttccccgaatagtcgcaagcggaaaggcaaaatgttcaagctcattcgcttctttcgcgcaagcgacaatattcgataacagctcattgtccatttccagacattccaaagggaggtttctgataaccttgccatcggaatggagcaaatacgaacttgataagagtgggtatgtgatggttaccggatatggctatgtagaaggcggttcacgccctgtgagtgccactgtgacagatttcatagccaattccttctttgttgttctaagtgatggtggagctccttgtgatgcggatggcggtttttattttgaaataaaagtatattaaagcaatgatattatggcagaagaaactaaaacattaaggcatacagccgaagagatagatgatgctatcgacaagcttcctagcaatggtaatgcggcagggatctacaaatcttccctgtctttcagttccatcgtaaatgacggtaacgtaacccaagaccacctaaccgaaataaattctatttatgcggcatggaaatccggtagaatgatatatgtcctggacgaaaaaggtgggtattacaatttgggagtgctaaacatgcaatcggcagaagataattcaaagtgctcattcgtggcattagaccaagatggcgtattatgctattattcctgcaacccgtcttccggtgttacgggtaaatggtctgttactcctattgggaaggatttattcgcactgattcagcatacccataaagcaagtgatgtaacagaggagaaaaacaagcgtttcgtgactgatgaggaaaaggatgaactaagcactctaagtactacatacgctaaagccgacctctccaatgccatgactgtttccctgaaccagaacggttatgctaagtttaataacggtctgctgatacaatggggatattttagcaccggtgcttcaaataatcagtctgtcaatttcccaatatctttcaaatcctgtttttccctagctttttctagttctacggataatacggataattctatatggtctgtgaattatgcagctatatatgcttcatattttacggtttatagaagatatgcaaatgcgggaagtgtatccccttcttcgcagtcattcagatggatagcaataggaagttggaaataattaatgataaaaggttatgacggtaaataaaaaaatgtattggaacaactcaattttgtattataaactcaaaaacagataaagctatgattctattagtactattatcattcattctcatcgcaggctatgtttatgcgatgattaagaaagggaaagaaatcccttattcaatcagtgccacctattatgcgctgacacacaaattttggttcgctctgtgcatgattggctccggtgttctgcttcttccggcagctttggaatcaagtacggagaacagccagtttcttgtattcctttcggttgtcggtatggttgtgctcggtgtgtctcccaacttcaaatcggagcaaaaggttcctcatgcaataggtgccgccatgtccttaatcttctcccagatatgggtaggctgcaacagttggtactggcttctgttatggttgggattcattatttacatggttgtctccatgaagaagcattggacgggtaacttcatctccgatttcataaagagaaagccgatgttctggattgaggtaatttcattgttggccgtttatcttacttgcttggtttaatatggaacaaatcagtcagatagtggcaatgacaggtgggatagtcgcaactatcctgcttcccctcattggagccttccagttctacgattcgaagaagagaaaagaagcagcagccgccaagaaggcggaagctgagaatataacccagtatgcagccgagtggaaagaattgtacgagaagaaagaagccaaagttcatgaactggataccaagatcgaccaactttatgttgagaagaatgaagaccgcgagcgcatacgtgacctacagtctaagaatgtaaagctcgaactcgagaatcaggcattgaatttcaagaaatgcgaagtcagaggatgcaaggagcgtaagccgcccagtgattattaaaacataattatatgagctggataaatgaaagtaaccgtatcaagcacctgctctacgccatcccggcaggtgcactgttaaccatcctgtttgcggcaggactggctgtcggcatggagttcaaggaccgtgcatacggtggaaaatgggattggctcgatattgccgctacgctgataggtggttttatcggtcaggtgattcaaattggagtattaacattgatattataggagggaataaatatgagtttaccaagaggactaagaaacaataatccgggcaacatccgcatcacaaaggacaaatggcagggattgagagaaaagcaggaagataagtcgttcttccagtttacggaaatgagatggggctaccgtgcccttatccgcactttgcagaactaccgtaatagacacggctgtcagacggtggcagattttatccaccggtgggcaccggagaacgagaataatacagccggatatatcagccgtgtatgcagtgaaatgcaagtcccgaacacatacgtcccggacatcaacgacaaagcgaccatgtgtgctttcgctgccgctatctcacgtgtagagaacggtgttccggctgtcatggcagacatagaagccggatgggaattgttataaattaaaaaaaggagaaacaatcatggcaacaataaatttggagttcaaaaagaatagcagcgtatggtatgcggaatttcaggtaaattctgatttcaatatccatttggaacgtgacaactgcggtcgggtgaatatccttcaacggacgacaagtgaagggaattttgaacctgtggttttgcccggaagtcttgcgtacaatgcagggacaaccatagactgcgacttctcggctttagtttatccgaaaactatccgcatcgagagtggaagtgaagtattaagtggaacagtaaccgaatccggcaatgaagcttaacaagttaccattaaatgtaatagggttgaatcgggttggtttgaatcagatcggttcgccttcccaccgggctaatacttccgaccgtccttacatagacccggaagtattggcttctttggttgccgtctgtatctgtgacggcaagagcaataacgaccctgacagggctgtaatcaagaacttggttgacccggacaatccgtttgtgattagcaatgcggcttacgaaggtatgagtggatgtaatggctatcctgttgtatttggtgaaaataagacatatcaacgcgtgggctatggaaaagctactagtactgttatgcacttaactaatatatatactacacaggctttaatgtttagttatataaaagatgcgggaaaactcacttctcttaataaggattatccttcgtataaaataaaggttagtggaattaaaaaggaatttagattaagatatcaatacgtaaaaaacgcagataataccaatatttctgtatttgatatatttaatgacggtacttatgctattcctaagtcagtagcaagtgatggtagtttaacttccgataatgtttgggttggttttatatttataggtacagttcctgaatcagtcgatataactattgaagtcctccccgaatacgaaggcgcattcgtcactgacggtaaagacgacttaatcacttccaccaagacggttaaggaaatgttaggaggaagcaatgaggttaccgtggtgagtatgattcatcagataggattaaacagtactcatgataaagcatttactaattacatagaagctactaatgctacaactcattatattagaagtcaatcaaaaactgctgggaaaactggtatatacggttatacttataatagtgcaactcaatcattgattaataatatattaggagataaaaacgattatgaaaagtcattagcgaatgcagctaatattttaagtgaatcttccatttttagagttgccagtggaaatagctcaactgacacattatctcaagtagcttggtactggacattcatcgccaacaaggtactgaccaccgaccaaatcaatcaggtaatatcctacttcaatttggacaagcatgttaaaccggatatcatctacgacaccatccggcagggcatcaccaatgagaaccacgcttctttcaacgatgagcttgtggacttctccggcaacgggcataatatgaagatttacaactctgcgtggaacaaagagagcggtatcaatgatgaaggggcttggcagactgacggagtaagcgattacggaaatgttgagaatcttccaattttgaaagattatacggttgctatcgaaagacggtggattacttcccctgtggataaaaatcaatgtttggcattcaaaggtcatacaaatgactggggtgcttttgcttgtgagtttagtaatgctggacaacttagaagctatacgtttagtcctacttataacattctgcaaagctataatgaaaaaagtttagtatatcaatctaaatattcatatagcggtactcctattgatgcgaaatcaacaatagatgggtctaccctacggttgtgtcttcctagaggtggttttactttctatgccaacgttgctattaaaatattcttgcttttcccttactccctttccgagttcctattggaacgccagttaaagaggtataagttgggtacgctgtatccgaatatggtggaatggagaccgattattagtagtaatatcccttatgataagatagagttctttgatgaacaatggactaagagaatctatcccggagattatgttgagataggagctactattaaagctaatctatatttaaataattatgatataagtactattactagtttaacttccagtcaatttgagagtgtgtatattgaccgtaaaggacaatattatgatgtagttctaagtggtattaagaagtctccacaaaagatagacataaccattgacgagtacatcagatacgagaatattgtacagccttatccagcaataattaatctaaaacaagatggtaaaactatcacttggggagataagttgaaagtaggcagtgatatagtctttgtaggaagtgccaaccttttaccggagctatatactgtatccgagacacggtataatggtgtaacgctttacccaaacactatcataaaggtagagaagtctatggtgtttgataatgcacgtacctacctaaaagccaatgagccgagctgtatcctgtcgcctaataggttgaggattccaaattctagctacaagatactaggctacattccggacttgacaggtaaaggtaatcatggtagattgaataacttcgcctacacggaagaaagtggagcaaatgaggacggtagtattcgctttgatggaacggatgactatattaccattcctactttggctcatggtgctaagcaggtattgatgaaggtgaatttacaaagttatgatagatacttgtatgaccaaagaaatacttggagtcaatacttagctattgtttcagcaggtaagacaatagcttatgaatactcaaataaaggtggtaaaacttatattgatggtatacttaatgaacacattattgataaagatttactgaatataactcataatataactgcagctaatgctaatataggagttcaatatgctcctaatattggcacttcatttgctagaggtaattttgctcaaatggctctattcgattttatgctattcccagaaatatctagtgaagatgagataaaggagctgaatgagtgtgtaggaatagagggaaatgtttggggaactctcacccaactaattaactcaactttaatttcaaatgaaacattaattaaaaatgaatgatatggaaaagatatttgatatagcaaaggacaaagaacagtcgtgggggactttagctactgcgattgatgggaattttgatgaaataagactacaaattaatatgcatcacggagaagattatacagaagaattgactgacaataatatgtatatagaaacaggcttccccattggaaccactatctcattagaaccgacaagcggtggtggatatgtttatataatacttgattgtaagcaaggagataagtatattgtgtcgggtagaggcggttcgaaaccgagaacttatgcttttgttgattcttctaatgttttgcaggaagtttcagatgtgggtgagagtttggaggatagtatattgattgctccttgcgatggtaaaatcatatacaattgcgataaaacacatactcccaaaaaggtttataaagtcggagtgatagaggataatcttgcagagataaacaacaagattgagagcgaatgtctcaagaaaagtttaacacgtacttcgaatttatttaatagtaaagagtatcgctatgatggatattatgatgattcacaagaatttataaaatcagaaacctatagttcatcttctgcgatatctgttaaacagggtaatacatatatcttttatgcagggtctactcctgattcattcggaggtggtgctaagagagtgttcaatgcgagtggcgtactgatcgccaaaacatatagttcttctattactgttccaagcgatggtggagagggttgtaagatgtatttttccgtacaaaatgcatcaaaagaggaagttgagagatacatggttgtagatagtgcgatagaggtgtta
